(19) United States
(12) Patent Application Publication
(10) Pub. No.: US 2006/0204967 A1
(43) Pub. Date: Sep. 14, 2006

(54) Methods for identifying risk of breast cancer and treatments thereof

(76) Inventors: Richard B. Roth, La Jolla, CA (US); Andreas Braun, San Diego, CA (US); Stefan M. Kammerer, San Diego, CA (US); Matthew Roberts Nelson, San Marcos, CA (US); Rikard H. Reneland, San Diego, CA (US)

Correspondence Address: BIOTECHNOLOGY LAW GROUP;C/O PORTFOLIOIP, PO BOX 52050, MINNEAPOLIS, MN, 55402, US

(21) Appl. No.: 10/723,683

(22) Filed: Nov. 25, 2003

Related U.S. Application Data
(60) Provisional application No. 60/429,136, filed on Nov. 25, 2002.
(60) Provisional application No. 60/490,234, filed on Jul. 24, 2003.

(51) Int. Cl. C12Q 1/68; A61K 48/00; C07H 21/04

(52) U.S. Cl. 435/6; 536/24.3; 514/44

(57) ABSTRACT

Provided herein are methods for identifying risk of breast cancer in a subject and/or a subject at risk of breast cancer, reagents and kits for carrying out the methods, methods for identifying candidate therapeutics for treating breast cancer, and therapeutic methods for treating breast cancer in a subject. These embodiments are based upon an analysis of polymorphic variations in nucleotide sequences within the human genome.

### RELATED PATENT APPLICATIONS

[0001] This patent application claims the benefit of provisional patent application no. 60/429,136 filed Nov. 25, 2002 and provisional patent application no. 60/490,234 filed Jul. 24, 2003, having attorney docket number 524593004100 and 524593004101, respectively. Each of these provisional patent applications names Richard B. Roth et al. as inventors and is hereby incorporated herein by reference in its entirety, including all drawings and cited publications and documents.

### FIELD OF THE INVENTION

[0002] The invention relates to genetic methods for identifying risk of breast cancer and treatments that specifically target the disease.

### BACKGROUND

[0003] Breast cancer is the third most common cancer, and the most common cancer in women, as well as a cause of disability, psychological trauma, and economic loss. Breast cancer is the second most common cause of cancer death in women in the United States, in particular for women between the ages of 15 and 54, and the leading cause of cancer-related death (Forbes, Seminars in Oncology, vol. 24(1), Suppl 1, 1997: pp. S1-20-S1-35). Indirect effects of the disease also contribute to the mortality from breast cancer including consequences of advanced disease, such as metastases to the bone or brain. Complications arising from bone marrow suppression, radiation fibrosis and neutropenic sepsis, collateral effects from therapeutic interventions, such as surgery, radiation, chemotherapy, or bone marrow transplantation-also contribute to the morbidity and mortality from this disease.

[0004] While the pathogenesis of breast cancer is unclear, transformation of normal breast epithelium to a malignant phenotype may be the result of genetic factors, especially in women under thirty (Miki, et al., Science, 266: 66-71 (1994)). However, it is likely that other, non-genetic factors also have a significant effect on the etiology of the disease. Regardless of its origin, breast cancer morbidity increases significantly if it is not detected early in its progression. Thus, considerable efforts have focused on the elucidation of early cellular events surrounding transformation in breast tissue. Such efforts have led to the identification of several potential breast cancer markers. For example, alleles of the BRCA1 and BRCA2 genes have been linked to hereditary and early-onset breast cancer (Wooster, et al., Science, 265: 2088-2090 (1994)). However, BRCA1 is limited as a cancer marker because BRCA1 mutations fail to account for the majority of breast cancers (Ford, et al., British J. Cancer, 72: 805-812 (1995)). Similarly, the BRCA2 gene, which has been linked to forms of hereditary breast cancer, accounts for only a small portion of total breast cancer cases.

### SUMMARY

[0005] It has been discovered that certain polymorphic variations in human genomic DNA are associated with the occurrence of breast cancer. In particular, polymorphic variants in loci containing GP6, LAMA4, CHGB/C20orf154 (hereafter referred to as “CHGB”), LOC338749 and IN/LOC351327 (hereafter referred to as “TTN”) regions in human genomic DNA have been associated with risk of breast cancer.

[0006] Thus, featured herein are methods for identifying a subject at risk of breast cancer and/or a risk of breast cancer in a subject, which comprises detecting the presence or absence of one or more polymorphic variations associated with breast cancer in genomic regions described herein in a human nucleic acid sample. In an embodiment, two or more polymorphic variations are detected in two or more regions selected from the group consisting of GP6, LAMA4, CHGB, LOC338749 and TTN. In certain embodiments, 3 or fewer, or 4, 5, 6, 7, 8, 9, 10, 11, 12, 13, 14, 15, 16, 17, 18, 19 or 20 or fewer polymorphic variants are detected.

[0007] Also featured are nucleic acids that include one or more polymorphic variations associated with the occurrence of breast cancer, as well as polypeptides encoded by these nucleic acids. Further, provided is a method for identifying a subject at risk of breast cancer and then prescribing to the subject a breast cancer detection procedure, prevention procedure and/or a treatment procedure. In addition, provided are methods for identifying candidate therapeutic molecules for treating breast cancer and related disorders, as well as methods for treating breast cancer in a subject by diagnosing breast cancer in the subject and treating the subject with a suitable treatment, such as administering a therapeutic molecule.

[0008] Also provided are compositions comprising a breast cancer cell and/or GP6, LAMA4, CHGB, LOC338749 or TTN nucleic acid with a RNAi, siRNA, antisense DNA or RNA, or ribozyme nucleic acid designed from a GP6, LAMA4, CHGB, LOC338749 or TTN nucleotide sequence. In an embodiment, the nucleic acid is designed from a GP6, LAMA4, CHGB, LOC338749 or TIN nucleotide sequence that includes one or more breast cancer associated polymorphic variations, and in some instances, specifically interacts with such a nucleotide sequence. Further, provided are arrays of nucleic acids bound to a solid surface, in which one or more nucleic acid molecules of the array have a GP6, LAMA4, CHGB, LOC338749 or TTN nucleotide sequence, or a fragment or substantially identical nucleic acid thereof, or a complementary nucleic acid of the foregoing. Featured also are compositions comprising a breast cancer cell and/or a GP6, LAMA4, CHGB, LOC338749 or TTN polypeptide, with an antibody that specifically binds to the polypeptide. In an embodiment, the antibody specifically binds to an epitope in the polypeptide that includes a non-synonymous amino acid modification associated with breast cancer (e.g., results in an amino acid substitution in the encoded polypeptide associated with breast cancer). In certain embodiments, the antibody specifically binds to an epitope that comprises a a lysine at amino acid position 237 of SEQ ID NO: 12, a proline at amino acid position 413 of SEQ ID NO: 16 or a glutamine at amino acid position 63 of SEQ ID NO: 16.

### BRIEF DESCRIPTION OF THE FIGURES

[0009] FIGS. 1A-1Y show a genomic nucleotide sequence for an GP6 region. The genomic nucleotide sequence is set forth in SEQ ID NO: 1. The following nucleotide representations are used throughout: “A” or “a” is adenosine, adenine, or adenylic acid; “C” or “c” is cytidine, cytosine, or cytidylic acid; “G” or “g” is guanosine, guanine, or guanylic acid; “T” or “t” is thymidine, thymine, or thymidylic acid; and “I” or “i” is inosine, hypoxanthine, or inosinic acid. Exons are indicated in italicized lower case type, introns are depicted in normal text lower case type, and polymorphic sites are depicted in bold upper case type. SNPs are designated by the following convention: “R” represents A or G, “M” represents A or C; “W” represents A or T; “Y” represents C or T; “S” represents C or G; “K” represents G or T; “V” represents A, C or G; “H” represents A, C, or T; “D” represents A, G, or T; “B” represents C, G, or T; and “N” represents A, G, C, or T.

[0010] FIGS. 2A-2Y show a genomic nucleotide sequence of a LAMA4 region. The genomic nucleotide sequence is set forth in SEQ ID NO: 2.

[0011] FIGS. 3A-3X show a genomic nucleotide sequence of a CHGB region. The genomic nucleotide sequence is set forth in SEQ ID NO: 3.

[0012] FIGS. 4A-4Y show a genomic nucleotide sequence of a LOC338749 region. The genomic nucleotide sequence is set forth in SEQ ID NO: 4.

[0013] FIGS. 5A-5Z show a genomic nucleotide sequence of a TTN region. The genomic nucleotide sequence is set forth in SEQ ID NO: 5.

[0014] FIGS. 6A-6B show three coding nucleotide sequences (cDNA) for GP6. The nucleotide sequence are set forth as SEQ ID NO: 6-8.

[0015] FIGS. 7A-7B show a coding nucleotide sequence (cDNA) for LAMA4. The nucleotide sequence is set forth in SEQ ID NO: 9.

[0016] FIG. 8 shows a coding nucleotide sequence (cDNA) for CHGB. The nucleotide sequence is set forth in SEQ ID NO: 10.

[0017] FIG. 9 shows a coding nucleotide sequence (cDNA) for TTN. The nucleotide sequence is set forth in SEQ ID NO: 11.

[0018] FIGS. 10A-10C show three GP6 polypeptide amino acid sequences, which are set forth as SEQ ID NO: 12-14.

[0019] FIGS. 11A-11B show an amino acid sequence for a LAMA4 polypeptide, which is set forth in SEQ ID NO: 15.

[0020] FIG. 12 shows an amino acid sequence for a CHGB polypeptide, which is set forth in SEQ ID NO: 16.

[0021] FIG. 13 shows an amino acid sequence for a TTN polypeptide, which is set forth in SEQ ID NO: 17.

[0022] FIGS. 14-18 show proximal SNPs in GP6, LAMA4, CHGB, LOC338749 and TTN loci in genomic DNA. The position of each SNP on the chromosome is shown on the x-axis and the y-axis provides the negative logarithm of the p-value comparing the estimated allele to that of the control group. Also shown in the figure are exons and introns of the genes in the approximate chromosomal positions. The figure indicates that polymorphic variants associated with breast cancer are in linkage disequilibrium in the following regions: the region spanning positions 185-8377 in SEQ ID NO: 1; the region spanning positions 506-95220 in SEQ ID NO: 2; the region spanning positions 5621-82574 in SEQ ID NO: 3; the region spanning positions 16120-55750 in SEQ ID NO: 4 or the region spanning positions 12473-96589 in SEQ ID NO: 5.

### DETAILED DESCRIPTION

[0023] It has been discovered that polymorphic variations in the GP6, LAMA4, CHGB, LOC338749 and TTN regions described herein are associated with an increased risk of breast cancer.

[0024] The gene GP6 (glycoprotein VI (platelet)) is also known as GPIV and GPVI. GP6 has been mapped to chromosomal position 19q13.4. Glycoprotein VI (GP6) is a 58-kD platelet membrane glycoprotein that plays a crucial role in the collagen-induced activation and aggregation of platelets. Upon injury to the vessel wall and subsequent damage to the endothelial lining, exposure of the subendothelial matrix to blood flow results in deposition of platelets. Collagen fibers are the most thrombogenic macromolecular components of the extracellular matrix, with collagen types I, III, and VI being the major forms found in blood vessels. Platelet interaction with collagen occurs as a 2-step procedure: (1) the initial adhesion to collagen is followed by (2) an activation step leading to platelet secretion, recruitment of additional platelets, and aggregation. In physiologic conditions, the resulting platelet plug is the initial hemostatic event limiting blood loss. However, exposure of collagen after rupture of atherosclerotic plaques is a major stimulus of thrombus formation associated with myocardial infarction or stroke. Based on the fact that GP VI is coupled to the Fc receptor-gamma chain (FCER1G; 147139) and thus should share homology with the FcR chains, they have been identified as human and mouse GP VI genes. They belong to the immunoglobulin superfamily and share 64% amino acid sequence homology. Functional evidence demonstrating the identity of the recombinant protein with GP VI was provided by binding to its natural ligand collagen; binding to convulxin (a GP VI-specific ligand from snake venom); binding of anti-GP VI IgG isolated from a patient; and association to the FcR-gamma chain.

[0025] The gene LAMA4 (laminin, alpha 4) is also known as laminin, alpha 4 precursor and LAMA3. LAMA4 has been mapped to chromosomal position 6q21. Laminins, a family of extracellular matrix glycoproteins, are the major noncollagenous constituent of basement membranes. They have been implicated in a wide variety of biological processes including cell adhesion, differentiation, migration, signaling, neurite outgrowth and metastasis. Laminins are composed of 3 non identical chains: laminin alpha, beta and gamma (formerly A, B1, and B2, respectively) and they form a cruciform structure consisting of 3 short arms, each formed by a different chain, and a long arm composed of all 3 chains. Each laminin chain is a multidomain protein encoded by a distinct gene. Several isoforms of each chain have been described. Different alpha, beta and gamma chain isomers combine to give rise to different heterotrimeric laminin isoforms which are designated by Arabic numerals in the order of their discovery, i.e. alpha1beta1gamma1 heterotrimer is laminin 1. The biological functions of the different chains and trimer molecules are largely unknown, but some of the chains have been shown to differ with respect to their tissue distribution, presumably reflecting diverse functions in vivo. This gene encodes the alpha chain isoform laminin, alpha 4. The domain structure of alpha 4 is similar to that of alpha 3, both of which resemble truncated versions of alpha 1 and alpha 2, in that approximately 1,200 residues at the N-terminus (domains IV, V and VI) have been lost. Laminin, alpha 4 contains the C-terminal G domain which distinguishes all alpha chains from the beta and gamma chains. The RNA analysis from adult and fetal tissues revealed developmental regulation of expression, however, the exact function of laminin, alpha 4 is not known. Tissue-specific utilization of alternative polyA-signal has been described in literature. Also, alternative splicing involving the first intron in the 5′ UTR, and laminin alpha 4 like isoforms have been noted, however, the full-length nature of these products is not known.

[0026] The gene (chromogranin B (secretogranin 1) is also known as SCG1. CHGB has been mapped to chromosomal position 20pter-p12. Chromogranin B is a tyrosine-sulfated secretory protein found in a wide variety of peptidergic endocrine cells. Chromogranin functions as a neuroendocrine secretory granule protein which likely is the precursor for other biologically active peptides.

[0027] The gene V20orf124 is also known as MCM8 minichromosome maintenance deficient 8 (S. cerevisiae), MGC4816, MGC12866, dJ967N21.5 and DNA replication licensing factor MCM8. C20Orf124 has been mapped to chromosomal position 20p12.3. The protein encoded by this gene is one of the highly conserved mini-chromosome maintenance proteins (MCM) that are essential for the initiation of eukaryotic genome replication. The hexameric protein complex formed by the MCM proteins is a key component of the pre-replication complex (pre RC) and may be involved in the formation of replication forks and in the recruitment of other DNA replication related proteins. This protein contains the central domain that is conserved among the MCM proteins. This protein has been shown to co-immunoprecipitate with MCM4, 6 and 7, which suggests that it may interact with other MCM proteins and play a role in DNA replication. Alternatively spliced transcript variants encoding distinct isoforms have been described.

[0028] The gene LOC338749 has been mapped to chromosomal position 11p15.3.

[0029] The gene TTN(titin) is also known as TMD, CMD1G, CMPD4, FLJ32040, connectin, CMH9, included cardiomyopathy, dilated 1G (autosomal dominant). TTN has been mapped to chromosomal position 2q31. This gene encodes a large abundant protein of striated muscle. The product of this gene is divided into two regions, a N-terminal I-band and a C-terminal A-band. The I-band, which is the elastic part of the molecule, contains two regions of tandem immunoglobulin domains on either side of a PEVK region that is rich in proline, glutamate, valine and lysine. The A-band, which is thought to act as a protein-ruler, contains a mixture of immunoglobulin and fibronectin repeats, and possesses kinase activity. A N-terminal Z-disc region and a C-terminal M-line region bind to the Z-line and M-line of the sarcomere respectively so that a single titin molecule spans half the length of a sarcomere. Titin also contains binding sites for muscle associated proteins so it serves as an adhesion template for the assembly of contractile machinery in muscle cells. It has also been identified as a structural protein for chromosomes. Considerable variability exists in the I-band, the M-line and the Z-disc regions of titin. Variability in the I-band region contributes to the differences in elasticity of different titin isoforms and, therefore, to the differences in elasticity of different muscle types. Of the many titin variants identified, complete transcript information is available for five. Mutations in this gene are associated with familial hypertrophic cardiomyopathy 9 and autoantibodies to titin are produced in patients with the autoimmune disease scleroderma.

[0030] Breast Cancer and Sample Selection

[0031] Breast cancer is typically described as the uncontrolled growth of malignant breast tissue. Breast cancers arise most commonly in the lining of the milk ducts of the breast (ductal carcinoma), or in the lobules where breast milk is produced (lobular carcinoma). Other forms of breast cancer include Inflammatory Breast Cancer and Recurrent Breast Cancer. Inflammatory breast cancer is a rare, but very serious, aggressive type of breast cancer. The breast may look red and feel warm with ridges, welts, or hives on the breast; or the skin may look wrinkled. It is sometimes misdiagnosed as a simple infection. Recurrent disease means that the cancer has come back after it has been treated. It may come back in the breast, in the soft tissues of the chest (the chest wall), or in another part of the body.

[0032] As used herein, the term “breast cancer” refers to a condition characterized by anomalous rapid proliferation of abnormal cells in one or both breasts of a subject. The abnormal cells often are referred to as 37 neoplastic cells,” which are transformed cells that can form a solid tumor. The term “tumor” refers to an abnormal mass or population of cells (i.e. two or more cells) that result from excessive or abnormal cell division, whether malignant or benign, and pre-cancerous and cancerous cells. Malignant tumors are distinguished from benign growths or tumors in that, in addition to uncontrolled cellular proliferation, they can invade surrounding tissues and can metastasize. In breast cancer, neoplastic cells may be identified in one or both breasts only and not in another tissue or organ, in one or both breasts and one or more adjacent tissues or organs (e.g. lymph node), or in a breast and one or more non-adjacent tissues or organs to which the breast cancer cells have metastasized.

[0033] The term “invasion” as used herein refers to the spread of cancerous cells to adjacent surrounding tissues. The term “invasion” often is used synonymously with the term “metastasis,” which as used herein refers to a process in which cancer cells travel from one organ or tissue to another non-adjacent organ or tissue. Cancer cells in the breast(s) can spread to tissues and organs of a subject, and conversely, cancer cells from other organs or tissue can invade or metastasize to a breast. Cancerous cells from the breast(s) may invade or metastasize to any other organ or tissue of the body. Breast cancer cells often invade lymph node cells and/or metastasize to the liver, brain and/or bone and spread cancer in these tissues and organs. Breast cancers can spread to other organs and tissues and cause lung cancer, prostate cancer, colon cancer, ovarian cancer, cervical cancer, gastrointestinal cancer, pancreatic cancer, glioblastoma, bladder cancer, hepatoma, colorectal cancer, uterine cervical cancer, endometrial carcinoma, salivary gland carcinoma, kidney cancer, vulval cancer, thyroid cancer, hepatic carcinoma, skin cancer, melanoma, ovarian cancer, neuroblastoma, myeloma, various types of head and neck cancer, acute lymphoblastic leukemia, acute myeloid leukemia, Ewing sarcoma and peripheral neuroepithelioma, and other carcinomas, lymphomas, blastomas, sarcomas, and leukemias.

[0034] Breast cancers arise most commonly in the lining of the milk ducts of the breast (ductal carcinoma), or in the lobules where breast milk is produced (lobular carcinoma). Other forms of breast cancer include Inflammatory Breast Cancer and Recurrent Breast Cancer. Inflammatory Breast Cancer is a rare, but very serious, aggressive type of breast cancer. The breast may look red and feel warm with ridges, welts, or hives on the breast; or the skin may look wrinkled. It is sometimes misdiagnosed as a simple infection. Recurrent disease means that the cancer has come back after it has been treated. It may come back in the breast, in the soft tissues of the chest (the chest wall), or in another part of the body. As used herein, the term “breast cancer” may include both Inflammatory Breast Cancer and Recurrent Breast Cancer.

[0035] In an effort to detect breast cancer as early as possible, regular physical exams and screening mammograms often are prescribed and conducted. A diagnostic mammogram often is performed to evaluate a breast complaint or abnormality detected by physical exam or routine screening mammography. If an abnormality seen with diagnostic mammography is suspicious, additional breast imaging (with exams such as ultrasound) or a biopsy may be ordered. A biopsy followed by pathological (microscopic) analysis is a definitive way to determine whether a subject has breast cancer. Excised breast cancer samples often are subjected to the following analyses: diagnosis of the breast tumor and confirmation of its malignancy; maximum tumor thickness; assessment of completeness of excision of invasive and in situ components and microscopic measurements of the shortest extent of clearance; level of invasion; presence and extent of regression; presence and extent of ulceration; histological type and special variants; pre-existing lesion; mitotic rate; vascular invasion; neurotropism; cell type; tumor lymphocyte infiltration; and growth phase.

[0036] The stage of a breast cancer can be classified as a range of stages from Stage 0 to Stage IV based on its size and the extent to which it has spread. The following table summarizes the stages:

TABLE A

| | | Lymph | |
|---|---|---|---|
| Stage | Tumor Size | Node Involvement | Metastasis (Spread) |
| I | Less than 2 cm | No | No |
| II | Between 2-5 cm | No or in same side of | No |
| | | breast | |
| III | More than 5 cm | Yes, on same side of | No |
| | | breast | |
| IV | Not applicable | Not applicable | Yes |

[0037] Stage 0 cancer is a contained cancer that has not spread beyond the breast ductal system. Fifteen to twenty percent of breast cancers detected by clinical examinations or testing are in Stage 0 (the earliest form of breast cancer). Two types of Stage 0 cancer are lobular carcinoma in situ (LCIS) and ductal carcinoma in situ (DCIS). LCIS indicates high risk for breast cancer. Many physicians do not classify LCIS as a malignancy and often encounter LCIS by chance on breast biopsy while investigating another area of concern. While the microscopic features of LCIS are abnormal and are similar to malignancy, LCIS does not behave as a cancer (and therefore is not treated as a cancer). LCIS is merely a marker for a significantly increased risk of cancer anywhere in the breast. However, bilateral simple mastectomy may be occasionally performed if LCIS patients have a strong family history of breast cancer. In DCIS the cancer cells are confined to milk ducts in the breast and have not spread into the fatty breast tissue or to any other part of the body (such as the lymph nodes). DCIS may be detected on mammogram as tiny specks of calcium (known as microcalcifications) 80% of the time. Less commonly DCIS can present itself as a mass with calcifications (15% of the time); and even less likely as a mass without calcifications (<5% of the time). A breast biopsy is used to confirm DCIS. A standard DCIS treatment is breast-conserving therapy (BCT), which is lumpectomy followed by radiation treatment or mastectomy. To date, DCIS patients have chosen equally among lumpectomy and mastectomy as their treatment option, though specific cases may sometimes favor lumpectomy over mastectomy or vice versa.

[0038] In Stage 1, the primary (original) cancer is 2 cm or less in diameter and has not spread to the lymph nodes. In Stage IIA, the primary tumor is between 2 and 5 cm in diameter and has not spread to the lymph nodes. In Stage IIB, the primary tumor is between 2 and 5 cm in diameter and has spread to the axillary (underarm) lymph nodes; or the primary tumor is over 5 cm and has not spread to the lymph nodes. In Stage IIIA, the primary breast cancer of any kind that has spread to the axillary (underarm) lymph nodes and to axillary tissues. In Stage IIIB, the primary breast cancer is any size, has attached itself to the chest wall, and has spread to the pectoral (chest) lymph nodes. In Stage IV, the primary cancer has spread out of the breast to other parts of the body (such as bone, lung, liver, brain). The treatment of Stage IV breast cancer focuses on extending survival time and relieving symptoms.

[0039] Based in part upon selection criteria set forth above, individuals having breast cancer can be selected for genetic studies. Also, individuals having no history of cancer or breast cancer often are selected for genetic studies. Other selection criteria can include: a tissue or fluid sample is derived from an individual characterized as Caucasian; the sample was derived from an individual of German paternal and maternal descent; the database included relevant phenotype information for the individual; case samples were derived from individuals diagnosed with breast cancer; control samples were derived from individuals free of cancer and no family history of breast cancer; and sufficient genomic DNA was extracted from each blood sample for all allelotyping and genotyping reactions performed during the study. Phenotype information included pre- or post-menopausal, familial predisposition, country or origin of mother and father, diagnosis with breast cancer (date of primary diagnosis, age of individual as of primary diagnosis, grade or stage of development, occurrence of metastases, e.g., lymph node metastases, organ metastases), condition of body tissue (skin tissue, breast tissue, ovary tissue, peritoneum tissue and myometrium), method of treatment (surgery, chemotherapy, hormone therapy, radiation therapy).

[0040] Provided herein is a set of blood samples and a set of corresponding nucleic acid samples isolated from the blood samples, where the blood samples are donated from individuals diagnosed with breast cancer. The sample set often includes blood samples or nucleic acid samples from 100 or more, 150 or more, or 200 or more individuals having breast cancer, and sometimes from 250 or more, 300 or more, 400 or more, or 500 or more individuals. The individuals can have parents from any place of origin, and in an embodiment, the set of samples are extracted from individuals of German paternal and German maternal ancestry. The samples in each set may be selected based upon five or more criteria and/or phenotypes set forth above.

[0041] Polymorphic Variants Associated with Breast Cancer

[0042] A genetic analysis provided herein linked breast cancer with polymorphic variants in the GP6, LAMA4, CHGB, LOC338749 and TTN regions of the human genome disclosed herein. As used herein, the term “polymorphic site” refers to a region in a nucleic acid at which two or more alternative nucleotide sequences are observed in a significant number of nucleic acid samples from a population of individuals. A polymorphic site may be a nucleotide sequence of two or more nucleotides, an inserted nucleotide or nucleotide sequence, a deleted nucleotide or nucleotide sequence, or a microsatellite, for example. A polymorphic site that is two or more nucleotides in length may be 3, 4, 5, 6, 7, 8, 9, 10, 11, 12, 13, 14, 15 or more, 20 or more, 30 or more, 50 or more, 75 or more, 100 or more, 500 or more, or about 1000 nucleotides in length, where all or some of the nucleotide sequences differ within the region. A polymorphic site is often one nucleotide in length, which is referred to herein as a “single nucleotide polymorphism” or a “SNP.”

[0043] Where there are two, three, or four alternative nucleotide sequences at a polymorphic site, each nucleotide sequence is referred to as a “polymorphic variant” or “nucleic acid variant.” Where two polymorphic variants exist, for example, the polymorphic variant represented in a minority of samples from a population is sometimes referred to as a “minor allele” and the polymorphic variant that is more prevalently represented is sometimes referred to as a “major allele.” Many organisms possess a copy of each chromosome (e.g., humans), and those individuals who possess two major alleles or two minor alleles are often referred to as being “homoygous” with respect to the polymorphism, and those individuals who possess one major allele and one minor allele are normally referred to as being “heterozygous” with respect to the polymorphism. Individuals who are homozygous with respect to one allele are sometimes predisposed to a different phenotype as compared to individuals who are heterozygous or homozygous with respect to another allele.

[0044] Furthermore, a genotype or polymorphic variant may be expressed in terms of a “haplotype,” which as used herein refers to two or more polymorphic variants occurring within genomic DNA in a group of individuals within a population. For example, two SNPs may exist within a gene where each SNP position includes a cytosine variation and an adenine variation. Certain individuals in a population may carry one allele (heterozygous) or two alleles (homozygous) having the gene with a cytosine at each SNP position. As the two cytosines corresponding to each SNP in the gene travel together on one or both alleles in these individuals, the individuals can be characterized as having a cytosine/cytosine haplotype with respect to the two SNPs in the gene.

[0045] As used herein, the term “phenotype” refers to a trait which can be compared between individuals, such as presence or absence of a condition, a visually observable difference in appearance between individuals, metabolic variations, physiological variations, variations in the function of biological molecules, and the like. An example of a phenotype is occurrence of breast cancer.

[0046] Researchers sometimes report a polymorphic variant in a database without determining whether the variant is represented in a significant fraction of a population. Because a subset of these reported polymorphic variants are not represented in a statistically significant portion of the population, some of them are sequencing errors and/or not biologically relevant. Thus, it is often not known whether a reported polymorphic variant is statistically significant or biologically relevant until the presence of the variant is detected in a population of individuals and the frequency of the variant is determined. Methods for detecting a polymorphic variant in a population are described herein, specifically in Example 2. A polymorphic variant is statistically significant and often biologically relevant if it is represented in 5% or more of a population, sometimes 10% or more, 15% or more, or 20% or more of a population, and often 25% or more, 30% or more, 35% or more, 40% or more, 45% or more, or 50% or more of a population.

[0047] A polymorphic variant may be detected on either or both strands of a double-stranded nucleic acid. For example, a thymine at a particular position in SEQ ID NO: 1 can be reported as an adenine from the complementary strand. Also, a polymorphic variant may be located within an intron or exon of a gene or within a portion of a regulatory region such as a promoter, a 5′ untranslated region (UTR), a 3′ UTR, and in DNA (e.g., genomic DNA (gDNA) and complementary DNA (cDNA)), RNA (e.g., mRNA, tRNA, and rRNA), or a polypeptide. Polymorphic variations may or may not result in detectable differences in gene expression, polypeptide structure, or polypeptide function.

[0048] In the genetic analysis that associated breast cancer with the polymorphic variants described hereafter, samples from individuals having breast cancer and individuals not having cancer were allelotyped and genotyped. The term “genotyped” as used herein refers to a process for determining a genotype of one or more individuals, where a “genotype” is a representation of one or more polymorphic variants in a population. Genotypes may be expressed in terms of a “haplotype,” which as used herein refers to two or more polymorphic variants occurring within genomic DNA in a group of individuals within a population. For example, two SNPs may exist within a gene where each SNP position includes a cytosine variation and an adenine variation. Certain individuals in a population may carry one allele (heterozygous) or two alleles (homozygous) having the gene with a cytosine at each SNP position. As the two cytosines corresponding to each SNP in the gene travel together on one or both alleles in these individuals, the individuals can be characterized as having a cytosine/cytosine haplotype with respect to the two SNPs in the gene.

[0049] It was determined that polymorphic variations associated with an increased risk of breast cancer existed in GP6, LAMA4, CHGB, LOC338749 or TTN nucleotide sequences. Polymorphic variants in and around the GP6, LAMA4, CHGB, LOC338749 and TTN loci were tested for association with breast cancer. In the GP6 locus, these included polymorphic variants at positions in SEQ ID NO: 1 selected from the group consisting of 185, 237, 641, 719, 990, 2908, 3140, 3880, 4494, 5107, 5220, 6031, 8670, 13794, 16356, 17164, 17264, 20537, 20637, 20900, 21155, 21795, 21931, 22167, 22656, 23108, 23404, 24287, 24480, 24592, 24878, 26370, 27056, 27874, 31248, 31458, 31553, 31637, 31668, 31752, 37643, 43941, 44134, 44329, 44343, 44362, 44818, 44917, 45215, 45666, 45680, 46402, 46510, 46554, 46823, 47714, 48963, 49157, 49254, 49257, 49356, 55202, 55527, 55916, 56402, 56413, 56685, 56783, 58044, 58301, 58382, 58393, 58869, 59155, 59189, 62546, 62568, 70983, 71465, 71538, 72144, 72340, 72527, 72968, 73397, 73553, 73720, 74190, 74687, 74699, 75580, 76345, 76506, 77554, 77889, 77919, 78866, 79061, 83777, 84360, 84631, 85775, 87153, 89650, 89895, 90103, 90234, 90309, 90376, 90925, 91561, 91605, 92954 and 94228. Polymorphic variants in a region spanning positions 185-8377 in SEQ ID NO: 1 in particular were associated with an increased risk of breast cancer, including polymorphic variants at positions 185, 20537, 44329, 44362, 45666, 45680, 46510, 49254, 49356, 56402, 58301, 71465, 72527, 73553, 76345 and 83777 in SEQ ID NO: 1. At these positions in SEQ ID NO: 1, a thymine at position 185, a thymine at position 20537, a cytosine at position 44329, an adenine at position 44362, a guanine at position 45666, a thymine at position 45680, a thymine at position 46510, a guanine at position 49254, a thymine at position 49356, a guanine at position 56402, a cytosine at position 58301, an adenine at position 71465, a guanine at position 72527, a guanine at position 73553, a thymine at position 76345 and an adenine at position 83777 in particular were associated with risk of breast cancer. Also, a lysine at amino acid position 237 in SEQ ID NO: 12 was associated with an increased risk of breast cancer.

[0050] In the LAMA4 locus, these included polymorphic variants at positions in SEQ ID NO: 2 selected from the group consisting of 184, 506, 3981, 7815, 7875, 10775, 10786, 11013, 11020, 11101, 14171, 14278, 16512, 16706, 18442, 20286, 21591, 22275, 25318, 27997, 29840, 31088, 31258, 32367, 32427, 33671, 38796, 41530, 41874, 44161, 47502, 51089, 51205, 53645, 54280, 57610, 57740, 60812, 60837, 64448, 65249, 65482, 66535, 66789, 67214, 68347, 69060, 70100, 70215, 73687, 73732, 74183, 74813, 78136, 79540, 79655, 79731, 82111, 82155, 83479, 84511, 85290, 90620, 91127, 92095, 92679, 94839 and 95220. Polymorphic variants in a region spanning positions 506-95220 in SEQ ID NO: 2 in particular were associated with an increased risk of breast cancer, including polymorphic variants at positions 506, 3981, 7815, 7875, 11020, 11101, 18442, 47502, 53645, 65249, 73687, 73732, 74183, 79540, 82155, 85290, 90620, 91127, 92095, 92679, 94839 and 95220 in SEQ ID NO: 2. At these positions in SEQ ID NO: 2, a cytosine at position 506, a cytosine at position 3981, a guanine at position 7815, a guanine at position 7875, a thymine at position 11020, an adenine at position 11101, an adenine at position 18442, a cytosine at position 47502, a guanine at position 53645, a thymine at position 65249, a cytosine at position 73687, an adenine at position 73732, a thymine at position 74183, a thymine at position 79540, a thymine at position 82155, a cytosine at position 85290, a guanine at position 90620, a guanine at position 91127, an adenine at position 92095, a guanine at position 92679, a guanine at position 94839 and a cytosine at position 95220 in particular were associated with increased risk of breast cancer.

[0051] In the CHGB locus, these included polymorphic variants at positions in SEQ ID NO: 3 selected from the group consisting of 186, 1332, 1893, 2786, 2962, 3377, 5522, 5621, 5889, 7531, 8268, 8923, 8988, 9117, 9448, 9494, 9628, 9640, 11072, 11150, 11379, 11692, 12056, 12104, 14160, 14836, 14980, 15165, 15315, 15624, 15796, 15939, 16581, 17045, 18501, 21800, 21966, 22134, 22181, 23028, 23312, 23573, 23858, 23888, 23990, 24073, 25330, 26473, 27958, 28421, 28804, 29322, 30819, 31956, 32592, 32818, 32880, 33244, 33845, 34272, 34931, 36870, 37790, 38708, 39135, 39919, 40166, 40985, 41049, 41935, 42775, 43807, 44254, 44814, 45249, 47599, 47807, 48555, 49249, 49293, 57566, 63587, 64560, 65432, 66291, 71331, 73344, 74159, 74564, 78194, 79128, 79393, 81579, 82574, 85309, 87076, 87844 and 90241. Polymorphic variants in a region spanning positions 5621-82574 in SEQ ID NO: 3 in particular were associated with an increased risk of breast cancer, including polymorphic variants at positions 5621, 9628, 9640, 21800, 21966, 22134, 22181, 23028, 23573, 23888, 24073, 26473, 27958, 28421, 28804, 29322, 30819, 31956, 32592, 32818, 32880, 33244, 33845, 34931, 37790, 38708, 39135, 39919, 40166, 41049, 43807, 44254, 45249, 47807,4 8555, 49249, 49293, 57566, 63587, 64560, 65432, 66291, 71331, 73344, 74159, 78194, 79128, 81579 and 82574 in SEQ ID NO: 3. At these positions in SEQ ID NO: 3, a guanine at position 5621, a guanine at position 9628, a cytosine at position 9640, a guanine at position 21800, an adenine at position 21966, a guanine at position 22134, an adenine at position 22181, a guanine at position 23028, a thymine at position 23573, a guanine at positino 23888, an adenine at position 24073, a thymine at position 26473, a cytosine at position 27958, an adenine at position 28421, a thymine at position 28804, a cytosine at position 29322, a cytosine at position 30819, a guanine at position 31956, a guanine at position 32592, a cytosine at position 32818, a thymine at position 32880, a cytosine at position 33244, an adenine at position 33845, a thymine at position 34931, a thymine at position 37790, a guanine at position 38708, a thymine at position 39135, an adenine at position 39919, a thymine at position 40166, a guanine at position 41049, a cytosine at position 43807, a guanine at position 44254, a thymine at position 45249, a guanine at position 47807, a cytosine at position 48555, an adenine at position 49249, a cytosine at position 49293, a cytosine at position 57566, a cytosine at position 63587, a thymine at position 64560, a cytosine at position 65432, a thymine at position 66291, an adenine at position 71331, a thymine at position 73344, a thymine at position 74159, an adenine at position 78194, a cytosine at position 79128, an adenine at position 81579 and a cytosine at position 82574 in particular were associated with an increased risk of breast cancer. Also, a proline at amino acid position 413 and a glutamine at amino acid position 63 in particular associated with an increased risk of breast cancer.

[0052] In the LOC338749 locus, these included polymorphic variants at positions in SEQ ID NO: 4 selected from the group consisting of 142, 693, 731, 879, 1084, 2249, 2519, 4461, 4616, 5109, 5270, 5436, 5457, 6536, 9665, 16120, 29489, 29524, 49159, 49273, 49596, 50135, 50184, 50393, 50401, 55750, 73843, 73852, 74052, 75382, 75662, 75942, 77917, 78821, 94813 and 97149. Polymorphic variants in a region spanning positions 16120-55750 in SEQ ID NO: 4 in particular were associated with an increased risk of breast cancer, including polymorphic variants at positions 16120 and 55750 in SEQ ID NO: 4. At these positions in SEQ ID NO: 4, a thymine at position 16120 and a cytosine at position 55750 in particular were associated with an increased risk of breast cancer.

[0053] In the TTN locus, these included polymorphic variants at positions in SEQ ID NO: 5 selected from the group consisting of 200, 381, 5303, 6084, 6879, 7837, 7985, 9333, 11559, 12473, 12880, 13606, 14861, 20658, 22200, 24525, 26373, 42869, 43713, 44429, 49037, 49170, 50206, 51552, 51674, 56427, 56844, 57953, 60862, 61606, 62560, 65078, 65155, 70295, 70335, 70398, 79233, 80025, 84521, 84540, 85170, 85300, 87596, 89696, 92219 and 96589. Polymorphic variants in a region spanning positions 12473-96589 in SEQ ID NO: 5 in particular were associated with an increased risk of breast cancer, including polymorphic variants at positions 12473, 20658, 24525, 49037, 49170, 51552, 51674, 70335, 84521, 87596, 92219 and 96589 in SEQ ID NO: 5. At these positions in SEQ ID NO: 5, a cytosine at position 12473, a thymine at position 20658, a cytosine at position 24525, a guanine at position 49037, an adenine at position 49170, a thymine at position 51552, a guanine at position 51674, a thymine at position 70335, a guanine at position 84521, an adenine at position 87596, an adenine at position 92219 and a thymine at position 96589 in particular were associated with an increased risk of breast cancer.

[0054] Additional Polymorphic Variants Associated with Breast Cancer

[0055] Also provided is a method for identifying polymorphic variants proximal to an incident, founder polymorphic variant associated with breast cancer. Thus, featured herein are methods for identifying a polymorphic variation associated with breast cancer that is proximal to an incident polymorphic variation associated with breast cancer, which comprises identifying a polymorphic variant proximal to the incident polymorphic variant associated with breast cancer, where the incident polymorphic variant is in a nucleotide sequence set forth in SEQ ID NO: 1-5. The nucleotide sequence often comprises a polynucleotide sequence selected from the group consisting of (a) a nucleotide sequence set forth in SEQ ID NO: 1-5; (b) a nucleotide sequence which encodes a polypeptide having an amino acid sequence encoded by a nucleotide sequence in SEQ ID NO: 1-5; (c) a nucleotide sequence which encodes a polypeptide that is 90% or more identical to an amino acid sequence encoded by a nucleotide sequence in SEQ ID NO: 1-5 or a nucleotide sequence about 90% or more identical to the nucleotide sequence set forth in SEQ ID NO: 1-5; and (d) a fragment of a nucleotide sequence of (a), (b), or (c), often a fragment that includes a polymorphic site associated with breast cancer. The presence or absence of an association of the proximal polymorphic variant with breast cancer then is determined using a known association method, such as a method described in the Examples hereafter. In an embodiment, the incident polymorphic variant is described in SEQ ID NO: 1-5. In another embodiment, the proximal polymorphic variant identified sometimes is a publicly disclosed polymorphic variant, which for example, sometimes is published in a publicly available database. In other embodiments, the polymorphic variant identified is not publicly disclosed and is discovered using a known method, including, but not limited to, sequencing a region surrounding the incident polymorphic variant in a group of nucleic acid samples. Thus, multiple polymorphic variants proximal to an incident polymorphic variant are associated with breast cancer using this method.

[0056] The proximal polymorphic variant often is identified in a region surrounding the incident polymorphic variant. In certain embodiments, this surrounding region is about 50 kb flanking the first polymorphic variant (e.g. about 50 kb 5′ of the first polymorphic variant and about 50 kb 3′ of the first polymorphic variant), and the region sometimes is composed of shorter flanking sequences, such as flanking sequences of about 40 kb, about 30 kb, about 25 kb, about 20 kb, about 15 kb, about 10 kb, about 7 kb, about 5 kb, or about 2 kb 5′ and 3′ of the incident polymorphic variant. In other embodiments, the region is composed of longer flanking sequences, such as flanking sequences of about 55 kb, about 60 kb, about 65 kb, about 70 kb, about 75 kb, about 80 kb, about 85 kb, about 90 kb, about 95 kb, or about 100 kb 5′ and 3′ of the incident polymorphic variant.

[0057] In certain embodiments, polymorphic variants associated with breast cancer are identified iteratively. For example, a first proximal polymorphic variant is associated with breast cancer using the methods described above and then another polymorphic variant proximal to the first proximal polymorphic variant is identified (e.g., publicly disclosed or discovered) and the presence or absence of an association of one or more other polymorphic variants proximal to the first proximal polymorphic variant with breast cancer is determined.

[0058] The methods described herein are useful for identifying or discovering additional polymorphic variants that may be used to further characterize a gene, region or loci associated with a condition, a disease (e.g., breast cancer), or a disorder. For example, allelotyping or genotyping data from the additional polymorphic variants may be used to identify a functional mutation or a region of linkage disequilibrium.

[0059] In certain embodiments, polymorphic variants identified or discovered within a region comprising the first polymorphic variant associated with breast cancer are genotyped using the genetic methods and sample selection techniques described herein, and it can be determined whether those polymorphic variants are in linkage disequilibrium with the first polymorphic variant. The size of the region in linkage disequilibrium with the first polymorphic variant also can be assessed using these genotyping methods. Thus, provided herein are methods for determining whether a polymorphic variant is in linkage disequilibrium with a first polymorphic variant associated with breast cancer, and such information can be used in prognosis methods described herein.

[0060] Isolated GP6, LAMA4, CHGB, LOC338749 or TTN Nucleic Acids

[0061] Featured herein are isolated GP6, LAMA4, CHGB, LOC338749 or TTN nucleic acids, which include the nucleic acid having the nucleotide sequence of SEQ ID NO: 1, 2, 3, 4, 5, 6, 7, 8, 9, 10 or 11, nucleic acid variants, and substantially identical nucleic acids of the foregoing. Nucleotide sequences of the GP6, LAMA4, CHGB, LOC338749 or TTN nucleic acids sometimes are referred to herein as “GP6, LAMA4, CHGB, LOC338749 or TTN nucleotide sequences.” A “GP6, LAMA4, CHGB, LOC338749 or TTN nucleic acid variant” refers to one allele that may have one or more different polymorphic variations as compared to another allele in another subject or the same subject. A polymorphic variation in the GP6, LAMA4, CHGB, LOC338749 or TTN nucleic acid variant may be represented on one or both strands in a double-stranded nucleic acid or on one chromosomal complement (heterozygous) or both chromosomal complements (homozygous).

[0062] As used herein, the term “nucleic acid” includes DNA molecules (e.g., a complementary DNA (cDNA) and genomic DNA (gDNA)) and RNA molecules (e.g., mRNA, rRNA, and tRNA) and analogs of DNA or RNA, for example, by use of nucleotide analogs. The nucleic acid molecule can be single-stranded and it is often double-stranded. The term “isolated or purified nucleic acid” refers to nucleic acids that are separated from other nucleic acids present in the natural source of the nucleic acid. For example, with regard to genomic DNA, the term “isolated” includes nucleic acids which are separated from the chromosome with which the genomic DNA is naturally associated. An “isolated” nucleic acid is often free of sequences which naturally flank the nucleic acid (i.e., sequences located at the 5′ and/or 3′ ends of the nucleic acid) in the genomic DNA of the organism from which the nucleic acid is derived. For example, in various embodiments, the isolated nucleic acid molecule can contain less than about 5 kb, 4 kb, 3 kb, 2 kb, 1 kb, 0.5 kb or 0.1 kb of 5′ and/or 3′ nucleotide sequences which flank the nucleic acid molecule in genomic DNA of the cell from which the nucleic acid is derived. Moreover, an “isolated” nucleic acid molecule, such as a cDNA molecule, can be substantially free of other cellular material, or culture medium when produced by recombinant techniques, or substantially free of chemical precursors or other chemicals when chemically synthesized. As used herein, the term “GP6, LAMA4, CHGB, LOC338749 or TTN gene” refers to a nucleotide sequence that encodes a GP6, LAMA4, CHGB, LOC338749 or TTN polypeptide.

[0063] Also included herein are nucleic acid fragments. These fragments typically are a nucleotide sequence identical to a nucleotide sequence in SEQ ID NO: 1-11, a nucleotide sequence substantially identical to a nucleotide sequence in SEQ ID NO: 1-11, or a nucleotide sequence that is complementary to the foregoing. The nucleic acid fragment may be identical, substantially identical or homologous to a nucleotide sequence in an exon or an intron in SEQ ID NO: 1-5, and may encode a domain or part of a domain or motif of a GP6, LAMA4, CHGB, LOC338749 or TTN polypeptide, sometimes the domains set forth in FIGS. 13-18. Sometimes, the fragment comprises the polymorphic variation described herein as being associated with breast cancer. The nucleic acid fragment sometimes is 50, 100, or 200 or fewer base pairs in length, and is sometimes about 300, 400, 500, 600, 700, 800, 900, 1000, 1100, 1200, 1300, 1400, 1500, 1600, 1700,1800, 1900, 2000, 2100, 2200, 2300, 2400, 2500, 2600, 2700, 2800, 2900, 3000, 3100, 3200, 3300, 3400, 3500, 3600, 3800, 4000, 5000, 6000, 7000, 8000, 9000, 10000, 15000, 20000, 30000, 40000, 50000, 60000, 70000, 80000, 90000, 100000, 110000, 120000, 130000, 140000, 150000 or 160000 base pairs in length. A nucleic acid fragment complementary to a nucleotide sequence identical or substantially identical to the nucleotide sequence of SEQ ID NO: 1-11 and hybridizes to such a nucleotide sequence under stringent conditions often is referred to as a “probe.” Nucleic acid fragments often include one or more polymorphic sites, or sometimes have an end that is adjacent to a polymorphic site as described hereafter.

[0064] An example of a nucleic acid fragment is an oligonucleotide. As used herein, the term “oligonucleotide” refers to a nucleic acid comprising about 8 to about 50 covalently linked nucleotides, often comprising from about 8 to about 35 nucleotides, and more often from about 10 to about 25 nucleotides. The backbone and nucleotides within an oligonucleotide may be the same as those of naturally occurring nucleic acids, or analogs or derivatives of naturally occurring nucleic acids, provided that oligonucleotides having such analogs or derivatives retain the ability to hybridize specifically to a nucleic acid comprising a targeted polymorphism. Oligonucleotides described herein may be used as hybridization probes or as components of prognostic or diagnostic assays, for example, as described herein.

[0065] Oligonucleotides are typically synthesized using standard methods and equipment, such as the ABI 3900 High Throughput DNA Synthesizer and the EXPEDITE™ 8909 Nucleic Acid Synthesizer, both of which are available from Applied Biosystems (Foster City, Calif.). Analogs and derivatives are exemplified in U.S. Pat. Nos. 4,469,863; 5,536,821; 5,541,306; 5,637,683; 5,637,684; 5,700,922; 5,717,083; 5,719,262; 5,739,308; 5,773,601; 5,886,165; 5,929,226; 5,977,296; 6,140,482; WO 00/56746; WO 01/14398, and related publications. Methods for synthesizing oligonucleotides comprising such analogs or derivatives are disclosed, for example, in the patent publications cited above and in U.S. Pat. Nos. 5,614,622; 5,739,314; 5,955,599; 5,962,674; 6,117,992; in WO 00/75372; and in related publications.

[0066] Oligonucleotides also may be linked to a second moiety. The second moiety may be an additional nucleotide sequence such as a tail sequence (e.g., a polyadenosine tail), an adapter sequence (e.g., phage M13 universal tail sequence), and others. Alternatively, the second moiety may be a non-nucleotide moiety such as a moiety which facilitates linkage to a solid support or a label to facilitate detection of the oligonucleotide. Such labels include, without limitation, a radioactive label, a fluorescent label, a chemiluminescent label, a paramagnetic label, and the like. The second moiety may be attached to any position of the oligonucleotide, provided the oligonucleotide can hybridize to the nucleic acid comprising the polymorphism.

Uses for Nucleic Acid Sequences

[0067] Nucleic acid coding sequences depicted in SEQ ID NO: 1-11 may be used for diagnostic purposes for detection and control of polypeptide expression. Also, included herein are oligonucleotide sequences such as antisense RNA, small-interfering RNA (siRNA) and DNA molecules and ribozymes that function to inhibit translation of a polypeptide. Antisense techniques and RNA interference techniques are known in the art and are described herein.

[0068] Ribozymes are enzymatic RNA molecules capable of catalyzing the specific cleavage of RNA. The mechanism of ribozyme action involves sequence specific hybridization of the ribozyme molecule to complementary target RNA, followed by a endonucleolytic cleavage. Ribozymes may be engineered hammerhead motif ribozyme molecules that specifically and efficiently catalyze endonucleolytic cleavage of RNA sequences corresponding to or complementary to the nucleotide sequences set forth in SEQ ID NO: 1-11. Specific ribozyme cleavage sites within any potential RNA target are initially identified by scanning the target molecule for ribozyme cleavage sites which include the following sequences, GUA, GUU and GUC. Once identified, short RNA sequences of between fifteen (15) and twenty (20) ribonucleotides corresponding to the region of the target gene containing the cleavage site may be evaluated for predicted structural features such as secondary structure that may render the oligonucleotide sequence unsuitable. The suitability of candidate targets may also be evaluated by testing their accessibility to hybridization with complementary oligonucleotides, using ribonuclease protection assays.

[0069] Antisense RNA and DNA molecules, siRNA and ribozymes may be prepared by any method known in the art for the synthesis of RNA molecules. These include techniques for chemically synthesizing oligodeoxyribonucleotides well known in the art such as solid phase phosphoramidite chemical synthesis. Alternatively, RNA molecules may be generated by in vitro and in vivo transcription of DNA sequences encoding the antisense RNA molecule. Such DNA sequences may be incorporated into a wide variety of vectors which incorporate suitable RNA polymerase promoters such as the T7 or SP6 polymerase promoters. Alternatively, antisense cDNA constructs that synthesize antisense RNA constitutively or inducibly, depending on the promoter used, can be introduced stably into cell lines.

[0070] DNA encoding a polypeptide also may have a number of uses for the diagnosis of diseases, including breast cancer, resulting from aberrant expression of a target gene described herein. For example, the nucleic acid sequence may be used in hybridization assays of biopsies or autopsies to diagnose abnormalities of expression or function (e.g., Southern or Northern blot analysis, in situ hybridization assays).

[0071] In addition, the expression of a polypeptide during embryonic development may also be determined using nucleic acid encoding the polypeptide. As addressed, infra, production of functionally impaired polypeptide can be the cause of various disease states, such as breast cancer. In situ hybridizations using polynucleotide probes may be employed to predict problems related to breast cancer. Further, as indicated, infra, administration of human active polypeptide, recombinantly produced as described herein, may be used to treat disease states related to functionally impaired polypeptide. Alternatively, gene therapy approaches may be employed to remedy deficiencies of functional polypeptide or to replace or compete with dysfunctional polypeptide.

[0072] Expression Vectors, Host Cells, and Genetically Engineered Cells

[0073] Provided herein are nucleic acid vectors, often expression vectors, which contain a GP6, LAMA4, CHGB, LOC338749 or TTN nucleic acid. As used herein, the term “vector” refers to a nucleic acid molecule capable of transporting another nucleic acid to which it has been linked and can include a plasmid, cosmid, or viral vector. The vector can be capable of autonomous replication or it can integrate into a host DNA. Viral vectors may include replication defective retroviruses, adenoviruses and adeno-associated viruses for example.

[0074] A vector can include a GP6, LAMA4, CHGB, LOC338749 or TTN nucleic acid in a form suitable for expression of the nucleic acid in a host cell. The recombinant expression vector typically includes one or more regulatory sequences operatively linked to the nucleic acid sequence to be expressed. The term “regulatory sequence” includes promoters, enhancers and other expression control elements (e.g., polyadenylation signals). Regulatory sequences include those that direct constitutive expression of a nucleotide sequence, as well as tissue-specific regulatory and/or inducible sequences. The design of the expression vector can depend on such factors as the choice of the host cell to be transformed, the level of expression of polypeptide desired, and the like. Expression vectors can be introduced into host cells to produce GP6, LAMA4, CHGB, LOC338749 or TTN polypeptides, including fusion polypeptides, encoded by GP6, LAMA4, CHGB, LOC338749 or TTN nucleic acids.

[0075] Recombinant expression vectors can be designed for expression of GP6, LAMA4, CHGB, LOC338749 or TTN polypeptides in prokaryotic or eukaryotic cells. For example, GP6, LAMA4, CHGB, LOC338749 or TTN polypeptides can be expressed in E. coli, insect cells (e.g., using baculovirus expression vectors), yeast cells, or mammalian cells. Suitable host cells are discussed further in Goeddel, Gene Expression Technology: Methods in Enzymology 185, Academic Press, San Diego, Calif. (1990). Alternatively, the recombinant expression vector can be transcribed and translated in vitro, for example using T7 promoter regulatory sequences and T7 polymerase.

[0076] Expression of polypeptides in prokaryotes is most often carried out in E. coli with vectors containing constitutive or inducible promoters directing the expression of either fusion or non-fusion polypeptides. Fusion vectors add a number of amino acids to a polypeptide encoded therein, usually to the amino terminus of the recombinant polypeptide. Such fusion vectors typically serve three purposes: 1) to increase expression of recombinant polypeptide; 2) to increase the solubility of the recombinant polypeptide; and 3) to aid in the purification of the recombinant polypeptide by acting as a ligand in affinity purification. Often, a proteolytic cleavage site is introduced at the junction of the fusion moiety and the recombinant polypeptide to enable separation of the recombinant polypeptide from the fusion moiety subsequent to purification of the fusion polypeptide. Such enzymes, and their cognate recognition sequences, include Factor Xa, thrombin and enterokinase. Typical fusion expression vectors include pGEX (Pharmacia Biotech Inc; Smith & Johnson, Gene 67: 31-40 (1988)), pMAL (New England Biolabs, Beverly, Mass.) and pRIT5 (Pharmacia, Piscataway, N.J.) which fuse glutathione S-transferase (GST), maltose E binding polypeptide, or polypeptide A, respectively, to the target recombinant polypeptide.

[0077] Purified fusion polypeptides can be used in screening assays and to generate antibodies specific for GP6, LAMA4, CHGB, LOC338749 or TTN polypeptides. In a therapeutic embodiment, fusion polypeptide expressed in a retroviral expression vector is used to infect bone marrow cells that are subsequently transplanted into irradiated recipients. The pathology of the subject recipient is then examined after sufficient time has passed (e.g., six (6) weeks).

[0078] Expressing the polypeptide in host bacteria with an impaired capacity to proteolytically cleave the recombinant polypeptide is often used to maximize recombinant polypeptide expression (Gottesman, S., Gene Expression Technology: Methods in Enzymology, Academic Press, San Diego, Calif. 185: 119-128 (1990)). Another strategy is to alter the nucleotide sequence of the nucleic acid to be inserted into an expression vector so that the individual codons for each amino acid are those preferentially utilized in E. coli (Wada et al., Nucleic Acids Res. 20: 2111-2118 (1992)). Such alteration of nucleotide sequences can be carried out by standard DNA synthesis techniques.

[0079] When used in mammalian cells, the expression vector's control functions are often provided by viral regulatory elements. For example, commonly used promoters are derived from polyoma, Adenovirus 2, cytomegalovirus and Simian Virus 40. Recombinant mammalian expression vectors are often capable of directing expression of the nucleic acid in a particular cell type (e.g., tissue-specific regulatory elements are used to express the nucleic acid). Non-limiting examples of suitable tissue-specific promoters include an albumin promoter (liver-specific; Pinkert et al., Genes Dev. 1: 268-277 (1987)), lymphoid-specific promoters (Calame & Eaton, Adv. Immunol. 43: 235-275 (1988)), promoters of T cell receptors (Winoto & Baltimore, EMBO J. 8: 729-733 (1989)) promoters of immunoglobulins (Banerji et al., Cell 33: 729-740 (1983); Queen & Baltimore, Cell 33: 741-748 (1983)), neuron-specific promoters (e.g., the neurofilament promoter; Byrne & Ruddle, Proc. Natl. Acad. Sci. USA 86: 5473-5477 (1989)), pancreas-specific promoters (Edlund et al., Science 230: 912-916 (1985)), and mammary gland-specific promoters (e.g., milk whey promoter; U.S. Pat. No. 4,873,316 and European Application Publication No. 264,166). Developmentally-regulated promoters are sometimes utilized, for example, the murine hox promoters (Kessel & Gruss, Science 249: 374-379 (1990)) and the α-fetopolypeptide promoter (Campes & Tilghman, Genes Dev. 3: 537-546 (1989)).

[0080] A GP6, LAMA4, CHGB, LOC338749 or TTN nucleic acid may also be cloned into an expression vector in an antisense orientation. Regulatory sequences (e.g., viral promoters and/or enhancers) operatively linked to a GP6, LAMA4, CHGB, LOC338749 or TTN nucleic acid cloned in the antisense orientation can be chosen for directing constitutive, tissue specific or cell type specific expression of antisense RNA in a variety of cell types. Antisense expression vectors can be in the form of a recombinant plasmid, phagemid or attenuated virus. For a discussion of the regulation of gene expression using antisense genes see Weintraub et al., Antisense RNA as a molecular tool for genetic analysis, Reviews—Trends in Genetics, Vol. 1(1) (1986).

[0081] Also provided herein are host cells that include a GP6, LAMA4, CHGB, LOC338749 or TTN nucleic acid within a recombinant expression vector or GP6, LAMA4, CHGB, LOC338749 or TTN nucleic acid sequence fragments which allow it to homologously recombine into a specific site of the host cell genome. The terms “host cell” and “recombinant host cell” are used interchangeably herein. Such terms refer not only to the particular subject cell but rather also to the progeny or potential progeny of such a cell. Because certain modifications may occur in succeeding generations due to either mutation or environmental influences, such progeny may not, in fact, be identical to the parent cell, but are still included within the scope of the term as used herein. A host cell can be any prokaryotic or eukaryotic cell. For example, a GP6, LAMA4, CHGB, LOC338749 or TTN polypeptide can be expressed in bacterial cells such as E. coli, insect cells, yeast or mammalian cells (such as Chinese hamster ovary cells (CHO) or COS cells). Other suitable host cells are known to those skilled in the art.

[0082] Vectors can be introduced into host cells via conventional transformation or transfection techniques. As used herein, the terms “transformation” and “transfection” are intended to refer to a variety of art-recognized techniques for introducing foreign nucleic acid (e.g., DNA) into a host cell, including calcium phosphate or calcium chloride co-precipitation, transduction/infection, DEAE-dextran-mediated transfection, lipofection, or electroporation.

[0083] A host cell provided herein can be used to produce (i.e., express) a GP6, LAMA4, CHGB, LOC338749 or TTN polypeptide. Accordingly, further provided are methods for producing a GP6, LAMA4, CHGB, LOC338749 or TTN polypeptide using the host cells described herein. In one embodiment, the method includes culturing host cells into which a recombinant expression vector encoding a GP6, LAMA4, CHGB, LOC338749 or TTN polypeptide has been introduced in a suitable medium such that a GP6, LAMA4, CHGB, LOC338749 or TTN polypeptide is produced. In another embodiment, the method further includes isolating a GP6, LAMA4, CHGB, LOC338749 or TTN polypeptide from the medium or the host cell.

[0084] Also provided are cells or purified preparations of cells which include a GP6, LAMA14, CHGB, LOC338749 or TTN transgene, or which otherwise misexpress GP6, LAMA4, CHGB, LOC338749 or TTN polypeptide. Cell preparations can consist of human or non-human cells, e.g., rodent cells, e.g., mouse or rat cells, rabbit cells, or pig cells. In certain embodiments, the cell or cells include a GP6, LAMA4, CHGB, LOC338749 or TTN transgene (e.g., a heterologous form of a GP6, LAMA4, CHGB, LOC338749 or TTN such as a human gene expressed in non-human cells). The GP6, LAMA4, CHGB, LOC338749 or TTN transgene can be misexpressed, e.g., overexpressed or underexpressed. In other embodiments, the cell or cells include a gene which misexpress an endogenous GP6, LAMA4, CHGB, LOC338749 or TTN polypeptide (e.g., expression of a gene is disrupted, also known as a knockout). Such cells can serve as a model for studying disorders which are related to mutated or mis-expressed GP6, LAMA4, CHGB, LOC338749 or TTN alleles or for use in drug screening. Also provided are human cells (e.g., a hematopoietic stem cells) transformed with a GP6, LAMA4, CHGB, LOC338749 or TTN nucleic acid.

[0085] Also provided are cells or a purified preparation thereof (e.g., human cells) in which an endogenous GP6, LAMA4, CHGB, LOC338749 or TTN nucleic acid is under the control of a regulatory sequence that does not normally control the expression of the endogenous GP6, LAMA4, CHGB, LOC338749 or TTN gene. The expression characteristics of an endogenous gene within a cell (e.g., a cell line or microorganism) can be modified by inserting a heterologous DNA regulatory element into the genome of the cell such that the inserted regulatory element is operably linked to the endogenous GP6, LAMA4, CHGB, LOC338749 or TTN gene. For example, an endogenous GP6, LAMA4, CHGB, LOC338749 or TTN gene (e.g., a gene which is “transcriptionally silent,” not normally expressed, or expressed only at very low levels) may be activated by inserting a regulatory element which is capable of promoting the expression of a normally expressed gene product in that cell. Techniques such as targeted homologous recombinations, can be used to insert the heterologous DNA as described in, e.g., Chappel, U.S. Pat. No. 5,272,071; WO 91/06667, published on May 16,1991.

[0086] Transgenic Animals

[0087] Non-human transgenic animals that express a heterologous GP6, LAMA4, CHGB, LOC338749 or TTN polypeptide (e.g., expressed from a GP6, LAMA4, CHGB, LOC338749 or TTN nucleic acid isolated from another organism) can be generated. Such animals are useful for studying the function and/or activity of a GP6, LAMA4, CHGB, LOC338749 or TTN polypeptide and for identifying and/or evaluating modulators of GP6, LAMA4, CHGB, LOC338749 or TTN nucleic acid and GP6, LAMA4, CHGB, LOC338749 or TTN polypeptide activity. As used herein, a “transgenic animal” is a non-human animal such as a mammal (e.g., a non-human primate such as chimpanzee, baboon, or macaque; an ungulate such as an equine, bovine, or caprine; or a rodent such as a rat, a mouse, or an Israeli sand rat), a bird (e.g., a chicken or a turkey), an amphibian (e.g., a frog, salamander, or newt), or an insect (e.g., Drosophila melanogaster), in which one or more of the cells of the animal includes a GP6, LAMA4, CHGB, LOC338749 or TTN transgene. A transgene is exogenous DNA or a rearrangement (e.g., a deletion of endogenous chromosomal DNA) that is often integrated into or occurs in the genome of cells in a transgenic animal. A transgene can direct expression of an encoded gene product in one or more cell types or tissues of the transgenic animal, and other transgenes can reduce expression (e.g., a knockout). Thus, a transgenic animal can be one in which an endogenous GP6, LAMA4, CHGB, LOC338749 or TTN gene has been altered by homologous recombination between the endogenous gene and an exogenous DNA molecule introduced into a cell of the animal (e.g., an embryonic cell of the animal) prior to development of the animal.

[0088] Intronic sequences and polyadenylation signals can also be included in the transgene to increase expression efficiency of the transgene. One or more tissue-specific regulatory sequences can be operably linked to a GP6, LAMA4, CHGB, LOC338749 or TTN transgene to direct expression of a GP6, LAMA4, CHGB, LOC338749 or TTN polypeptide to particular cells. A transgenic founder animal can be identified based upon the presence of a GP6, LAMA4, CHGB, LOC338749 or TTN transgene in its genome and/or expression of GP6, LAMA4, CHGB, LOC338749 or TTN mRNA in tissues or cells of the animals. A transgenic founder animal can then be used to breed additional animals carrying the transgene. Moreover, transgenic animals carrying a transgene encoding a GP6, LAMA4, CHGB, LOC338749 or TTN polypeptide can further be bred to other transgenic animals carrying other transgenes.

[0089] GP6, LAMA4, CHGB, LOC338749 or TTN polypeptides can be expressed in transgenic animals or plants by introducing, for example, a nucleic acid encoding the polypeptide into the genome of an animal. In certain embodiments the nucleic acid is placed under the control of a tissue specific promoter, e.g., a milk or egg specific promoter, and recovered from the milk or eggs produced by the animal. Also included is a population of cells from a transgenic animal.

[0090] GP6. LAMA4, CHGB, LOC338749 and TTN Polypeptides

[0091] Featured herein are isolated GP6, LAMA4, CHGB, LOC338749 or TTN polypeptides, which include polypeptides having amino acid sequences set forth in SEQ ID NO: 12-17, and substantially identical polypeptides thereof. Such polypeptides sometimes are proteins or peptides. A GP6, LAMA4, CHGB, LOC338749 or TTN polypeptide is a polypeptide encoded by a GP6, LAMA4, CHGB, LOC338749 or TTN nucleic acid, where one nucleic acid can encode one or more different polypeptides. An “isolated” or “purified” polypeptide or protein is substantially free of cellular material or other contaminating proteins from the cell or tissue source from which the protein is derived, or substantially free from chemical precursors or other chemicals when chemically synthesized. In one embodiment, the language “substantially free” means preparation of a GP6, LAMA4, CHGB, LOC338749 or TTN polypeptide or GP6, LAMA4, CHGB, LOC338749 or TTN polypeptide variant having less than about 30%, 20%, 10% and sometimes 5% (by dry weight), of non-GP6, LAMA4, CHGB, LOC338749 or TTN polypeptide (also referred to herein as a “contaminating protein”), or of chemical precursors or non-GP6, LAMA4, CHGB, LOC338749 or TTN chemicals. When the GP6, LAMA4, CHGB, LOC338749 or TTN polypeptide or a biologically active portion thereof is recombinantly produced, it is also often substantially free of culture medium, specifically, where culture medium represents less than about 20%, sometimes less than about 10%, and often less than about 5% of the volume of the polypeptide preparation. Isolated or purified GP6, LAMA4, CHGB, LOC338749 or TTN polypeptide preparations are sometimes 0.01 milligrams or more or 0.1 milligrams or more, and often 1.0 milligrams or more and 10 milligrams or more in dry weight. In specific embodiments, a GP6 polypeptide comprises a lysine at amino acid position 237 of SEQ ID NO: 12, and a CHGB polypeptide comprises a proline at amino acid position 413 of SEQ ID NO: 16 or a glutamine at amino acid position 63 of SEQ ID NO: 16.

[0092] In another aspect, featured herein are GP6, LAMA4, CHGB, LOC338749 or TTN polypeptides and biologically active or antigenic fragments thereof that are useful as reagents or targets in assays applicable to prevention, treatment or diagnosis of breast cancer. In another embodiment, provided herein are GP6, LAMA4, CHGB, LOC338749 or TTN polypeptides having a GP6, LAMA4, CHGB, LOC338749 or TTN activity or activities.

[0093] Further included herein are GP6, LAMA4, CHGB, LOC338749 or TTN polypeptide fragments. The polypeptide fragment may be a domain or part of a domain of a GP6, LAMA4, CHGB, LOC338749 or TTN polypeptide. The polypeptide fragment is often 50 or fewer, 100 or fewer, or 200 or fewer amino acids in length, and is sometimes 300, 400, 500, 600, 700, or 900 or fewer amino acids in length. In certain embodiments, the polypeptide fragment comprises, consists essentially of, or consists of, at least 6 consecutive amino acids and not more than 1211 consecutive amino acids of SEQ ID NO: 12-17, or the polypeptide fragment comprises, consists essentially of, or consists of, at least 6 consecutive amino acids and not more than 543 consecutive amino acids of SEQ ID NO: 12-17.

[0094] GP6, LAMA4, CHGB, LOC338749 or TTN polypeptides described herein can be used as immunogens to produce anti-GP6, LAMA4, CHGB, LOC338749 or TTN antibodies in a subject, to purify GP6, LAMA4, CHGB, LOC338749 or TTN ligands or binding partners, and in screening assays to identify molecules which inhibit or enhance the interaction of GP6, LAMA4, CHGB, LOC338749 or TTN with a GP6, LAMA4, CHGB, LOC338749 or TTN substrate. Full-length GP6, LAMA4, CHGB, LOC338749 or TTN polypeptides and polynucleotides encoding the same may be specifically substituted for a GP6, LAMA4, CHGB, LOC338749 or TTN polypeptide fragment or polynucleotide encoding the same in any embodiment described herein.

[0095] Substantially identical polypeptides may depart from the amino acid sequences set forth in SEQ ID NO: 12-17 in different manners. For example, conservative amino acid modifications may be introduced at one or more positions in the amino acid sequences of SEQ ID NO: 12-17. A “conservative amino acid substitution” is one in which the amino acid is replaced by another amino acid having a similar structure and/or chemical function. Families of amino acid residues having similar structures and functions are well known. These families include amino acids with basic side chains (e.g., lysine, arginine, histidine), acidic side chains (e.g., aspartic acid, glutamic acid), uncharged polar side chains (e.g., glycine, asparagine, glutamine, serine, threonine, tyrosine, cysteine), nonpolar side chains (e.g., alanine, valine, leucine, isoleucine, proline, phenylalanine, methionine, tryptophan), beta-branched side chains (e.g., threonine, valine, isoleucine) and aromatic side chains (e.g., tyrosine, phenylalanine, tryptophan, histidine). Also, essential and non-essential amino acids may be replaced. A “non-essential” amino acid is one that can be altered without abolishing or substantially altering the biological function of a GP6, LAMA4, CHGB, LOC338749 or TTN polypeptide, whereas altering an “essential” amino acid abolishes or substantially alters the biological function of a GP6, LAMA4, CHGB, LOC338749 or TTN polypeptide. Amino acids that are conserved among GP6, LAMA4, CHGB, LOC338749 or TTN polypeptides are typically essential amino acids.

[0096] Also, GP6, LAMA4, CHGB, LOC338749 or TTN polypeptides and polypeptide variants may exist as chimeric or fusion polypeptides. As used herein, a GP6, LAMA4, CHGB, LOC338749 or TTN “chimeric polypeptide” or “fusion polypeptide” includes a GP6, LAMA4, CHGB, LOC338749 or TTN polypeptide linked to a non-GP6, LAMA4, CHGB, LOC338749 or TTN polypeptide. A “non-GP6, LAMA4, CHGB, LOC338749 or TTN polypeptide” refers to a polypeptide having an amino acid sequence corresponding to a polypeptide which is not substantially identical to the GP6, LAMA4, CHGB, LOC338749 or TTN polypeptide, which includes, for example, a polypeptide that is different from the GP6, LAMA4, CHGB, LOC338749 or TTN polypeptide and derived from the same or a different organism. The GP6, LAMA4, CHGB, LOC338749 or TTN polypeptide in the fusion polypeptide can correspond to an entire or nearly entire GP6, LAMA4, CHGB, LOC338749 or TTN polypeptide or a fragment thereof. The non-GP6, LAMA4, CHGB, LOC338749 or TTN polypeptide can be fused to the N-terminus or C-terminus of the GP6, LAMA4, CHGB, LOC338749 or TTN polypeptide.

[0097] Fusion polypeptides can include a moiety having high affinity for a ligand. For example, the fusion polypeptide can be a GST-GP6, LAMA4, CHGB, LOC338749 or TTN fusion polypeptide in which the GP6, LAMA4, CHGB, LOC338749 or TTN sequences are fused to the C-terminus of the GST sequences, or a polyhistidine-GP6, LAMA4, CHGB, LOC338749 or TTN fusion polypeptide in which the GP6, LAMA4, CHGB, LOC338749 or TTN polypeptide is fused at the N— or C-terminus to a string of histidine residues. Such fusion polypeptides can facilitate purification of recombinant GP6, LAMA4, CHGB, LOC338749 or TTN. Expression vectors are commercially available that already encode a fusion moiety (e.g., a GST polypeptide), and a GP6, LAMA4, CHGB, LOC338749 or TTN nucleic acid can be cloned into an expression vector such that the fusion moiety is linked in-frame to the GP6, LAMA4, CHGB, LOC338749 or TTN polypeptide. Further, the fusion polypeptide can be a GP6, LAMA4, CHGB, LOC338749 or TTN polypeptide containing a heterologous signal sequence at its N-terminus. In certain host cells (e.g., mammalian host cells), expression, secretion, cellular internalization, and cellular localization of a GP6, LAMA4, CHGB, LOC338749 or TTN polypeptide can be increased through use of a heterologous signal sequence. Fusion polypeptides can also include all or a part of a serum polypeptide (e.g., an IgG constant region or human serum albumin).

[0098] GP6, LAMA4, CHGB, LOC338749 or TTN polypeptides or fragments thereof can be incorporated into pharmaceutical compositions and administered to a subject in vivo. Administration of these GP6, LAMA4, CHGB, LOC338749 or TTN polypeptides can be used to affect the bioavailability of a GP6, LAMA4, CHGB, LOC338749 or TTN substrate and may effectively increase or decrease GP6, LAMA4, CHGB, LOC338749 or TTN biological activity in a cell or effectively supplement dysfunctional or hyperactive GP6, LAMA4, CHGB, LOC338749 or TTN polypeptide. GP6, LAMA4, CHGB, LOC338749 or TTN fusion polypeptides may be useful therapeutically for the treatment of disorders caused by, for example, (i) aberrant modification or mutation of a gene encoding a GP6, LAMA4, CHGB, LOC338749 or TTN polypeptide; (ii) mis-regulation of the GP6, LAMA4, CHGB, LOC338749 or TTN gene; and (iii) aberrant post-translational modification of a GP6, LAMA4, CHGB, LOC338749 or TTN polypeptide. Also, GP6, LAMA4, CHGB, LOC338749 or TTN polypeptides can be used as immunogens to produce anti-GP6, LAMA4, CHGB, LOC338749 or TTN antibodies in a subject, to purify GP6, LAMA4, CHGB, LOC338749 or TTN ligands or binding partners, and in screening assays to identify molecules which inhibit or enhance the interaction of GP6, LAMA4, CHGB, LOC338749 or TTN with a GP6, LAMA4, CHGB, LOC338749 or TTN substrate. Preferably, said GP6, LAMA4, CHGB, LOC338749 or TTN polypeptides are used in screening assays to identify molecules which inhibit the interaction of GP6, LAMA4, CHGB, LOC338749 or TTN.

[0099] In addition, polypeptides can be chemically synthesized using techniques known in the art (See, e.g., Creighton, 1983 Proteins. New York, N.Y.: W. H. Freeman and Company; and Hunkapiller et al., (1984) Nature July 12-18;310(5973):105-11). For example, a relative short polypeptide fragment can be synthesized by use of a peptide synthesizer. Furthermore, if desired, non-classical amino acids or chemical amino acid analogs can be introduced as a substitution or addition into the fragment sequence. Non-classical amino acids include, but are not limited to, to the D-isomers of the common amino acids, 2,4-diaminobutyric acid, a-amino isobutyric acid, 4-aminobutyric acid, Abu, 2-amino butyric acid, g-Abu, e-Ahx, 6-amino hexanoic acid, Aib, 2-amino isobutyric acid, 3-amino propionic acid, ornithine, orleucine, norvaline, hydroxyproline, sarcosine, citrulline, homocitrulline, cysteic acid, t-butylglycine, t-butylalanine, phenylglycine, cyclohexylalanine, b-alanine, fluoroamino acids, designer amino acids such as b-methyl amino acids, Ca-methyl amino acids, Na-methyl amino acids, and amino acid analogs in general. Furthermore, the amino acid can be D (dextrorotary) or L (levorotary).

[0100] Also included are polypeptide fragments which are differentially modified during or after translation, e.g., by glycosylation, acetylation, phosphorylation, amidation, derivatization by known protecting/blocking groups, proteolytic cleavage, linkage to an antibody molecule or other cellular ligand, and the like. Any of numerous chemical modifications may be carried out by known techniques, including but not limited, to specific chemical cleavage by cyanogen bromide, trypsin, chymotrypsin, papain, V8 protease, NaBH₄; acetylation, formylation, oxidation, reduction; metabolic synthesis in the presence of tunicamycin; and the like.

[0101] Additional post-translational modifications include, for example, N-linked or O-linked carbohydrate chains, processing of N-terminal or C-terminal ends), attachment of chemical moieties to the amino acid backbone, chemical modifications of N-linked or O-linked carbohydrate chains, and addition or deletion of an N-terminal methionine residue as a result of prokaryotic host cell expression. The polypeptide fragments may also be modified with a detectable label, such as an enzymatic, fluorescent, isotopic or affinity label to allow for detection and isolation of the polypeptide.

[0102] Also provided are chemically modified polypeptide derivatives that may provide additional advantages such as increased solubility, stability and circulating time of the polypeptide, or decreased immunogenicity. See U.S. Pat. No: 4,179,337. The chemical moieties for derivitization may be selected from water soluble polymers such as polyethylene glycol, ethylene glycol/propylene glycol copolymers, carboxymethylcellulose, dextran, polyvinyl alcohol and the like. The polypeptides may be modified at random positions within the molecule, or at predetermined positions within the molecule and may include one, two, three or more attached chemical moieties.

[0103] The polymer may be of any molecular weight, and may be branched or unbranched. For polyethylene glycol, the molecular weight is between about 1 kDa and about 100 kDa (the term “about” indicating that in preparations of polyethylene glycol, some molecules will weigh more, some less, than the stated molecular weight) for ease in handling and manufacturing. Other sizes may be used, depending on the desired therapeutic profile (e.g., the duration of sustained release desired, the effects, if any on biological activity, the ease in handling, the degree or lack of antigenicity and other known effects of the polyethylene glycol to a therapeutic protein or analog).

[0104] The polyethylene glycol molecules (or other chemical moieties) should be attached to the polypeptide with consideration of effects on functional or antigenic domains of the polypeptide. There are a number of attachment methods available to those skilled in the art, e.g., EP 0 401 384, herein incorporated by reference (coupling PEG to G-CSF), see also Malik et al. (1992) Exp Hematol. September;20(8):1028-35, reporting pegylation of GM-CSF using tresyl chloride). For example, polyethylene glycol may be covalently bound through amino acid residues via a reactive group, such as, a free amino or carboxyl group. Reactive groups are those to which an activated polyethylene glycol molecule may be bound. The amino acid residues having a free amino group may include lysine residues and the N-terminal amino acid residues; those having a free carboxyl group may include aspartic acid residues, glutamic acid residues and the C-terminal amino acid residue. Sulfhydryl groups may also be used as a reactive group for attaching the polyethylene glycol molecules. A polymer sometimes is attached at an amino group, such as attachment at the N-terminus or lysine group.

[0105] One may specifically desire proteins chemically modified at the N-terminus. Using polyethylene glycol as an illustration of the present composition, one may select from a variety of polyethylene glycol molecules (by molecular weight, branching, and the like), the proportion of polyethylene glycol molecules to protein (polypeptide) molecules in the reaction mix, the type of pegylation reaction to be performed, and the method of obtaining the selected N-terminally pegylated protein. The method of obtaining the N-terminally pegylated preparation (i.e., separating this moiety from other monopegylated moieties if necessary) may be by purification of the N-terminally pegylated material from a population of pegylated protein molecules. Selective proteins chemically modified at the N-terminus may be accomplished by reductive alkylation, which exploits differential reactivity of different types of primary amino groups (lysine versus the N-terminal) available for derivatization in a particular protein. Under the appropriate reaction conditions, substantially selective derivatization of the protein at the N-terminus with a carbonyl group containing polymer is achieved.

[0106] Substantially Identical Nucleic Acids and Polypeptides

[0107] Nucleotide sequences and polypeptide sequences that are substantially identical to a GP6, LAMA4, CHGB, LOC338749 or TTN nucleotide sequence and the GP6, LAMA4, CHGB, LOC338749 or TTN polypeptide sequences encoded by those nucleotide sequences are included herein. The term “substantially identical” as used herein refers to two or more nucleic acids or polypeptides sharing one or more identical nucleotide sequences or polypeptide sequences, respectively. Included are nucleotide sequences or polypeptide sequences that are 55% or more, 60% or more, 65% or more, 70% or more, 75% or more, 80% or more, 85% or more, 90% or more, 95% or more (each often within a 1%, 2%, 3% or 4% variability) or more identical to the nucleotide sequences in SEQ ID NO: 1-11 or the encoded GP6, LAMA4, CHGB, LOC338749 or TTN polypeptide amino acid sequences. One test for determining whether two nucleic acids are substantially identical is to determine the percent of identical nucleotide sequences or polypeptide sequences shared between the nucleic acids or polypeptides.

[0108] Calculations of sequence identity are often performed as follows. Sequences are aligned for optimal comparison purposes (e.g., gaps can be introduced in one or both of a first and a second amino acid or nucleic acid sequence for optimal alignment and non-homologous sequences can be disregarded for comparison purposes). The length of a reference sequence aligned for comparison purposes is sometimes 30% or more, 40% or more, 50% or more, often 60% or more, and more often 70% or more, 80% or more, 90% or more, 90% or more, or 100% of the length of the reference sequence. The nucleotides or amino acids at corresponding nucleotide or polypeptide positions, respectively, are then compared among the two sequences. When a position in the first sequence is occupied by the same nucleotide or amino acid as the corresponding position in the second sequence, the nucleotides or amino acids are deemed to be identical at that position. The percent identity between the two sequences is a function of the number of identical positions shared by the sequences, taking into account the number of gaps, and the length of each gap, introduced for optimal alignment of the two sequences.

[0109] Comparison of sequences and determination of percent identity between two sequences can be accomplished using a mathematical algorithm. Percent identity between two amino acid or nucleotide sequences can be determined using the algorithm of Meyers & Miller, CABIOS 4: 11-17 (1989), which has been incorporated into the ALIGN program (version 2.0), using a PAM120 weight residue table, a gap length penalty of 12 and a gap penalty of 4. Also, percent identity between two amino acid sequences can be determined using the Needleman & Wunsch, J. Mol. Biol. 48: 444-453 (1970) algorithm which has been incorporated into the GAP program in the GCG software package (available at the http address www.gcg.com), using either a Blossum 62 matrix or a PAM250 matrix, and a gap weight of 16, 14, 12, 10, 8, 6, or 4 and a length weight of 1, 2, 3, 4, 5, or 6. Percent identity between two nucleotide sequences can be determined using the GAP program in the GCG software package (available at http address www.gcg.com), using a NWSgapdna.CMP matrix and a gap weight of 40, 50, 60, 70, or 80 and a length weight of 1, 2, 3, 4, 5, or 6. A set of parameters often used is a Blossum 62 scoring matrix with a gap open penalty of 12, a gap extend penalty of 4, and a frameshift gap penalty of 5.

[0110] Another manner for determining if two nucleic acids are substantially identical is to assess whether a polynucleotide homologous to one nucleic acid will hybridize to the other nucleic acid under stringent conditions. As use herein, the term “stringent conditions” refers to conditions for hybridization and washing. Stringent conditions are known to those skilled in the art and can be found in Current Protocols in Molecular Biology, John Wiley & Sons, N.Y., 6.3.1-6.3.6 (1989). Aqueous and non-aqueous methods are described in that reference and either can be used. An example of stringent hybridization conditions is hybridization in 6× sodium chloride/sodium citrate (SSC) at about 45° C., followed by one or more washes in 0.2×SSC, 0.1% SDS at 50° C. Another example of stringent hybridization conditions are hybridization in 6× sodium chloride/sodium citrate (SSC) at about 45° C., followed by one or more washes in 0.2×SSC, 0.1% SDS at 55° C. A further example of stringent hybridization conditions is hybridization in 6× sodium chloride/sodium citrate (SSC) at about 45° C., followed by one or more washes in 0.2×SSC, 0.1% SDS at 60° C. Often, stringent hybridization conditions are hybridization in 6× sodium chloride/sodium citrate (SSC) at about 45° C., followed by one or more washes in 0.2×SSC, 0.1% SDS at 65° C. More often, stringency conditions are 0.5M sodium phosphate, 7% SDS at 65° C., followed by one or more washes at 0.2×SSC, 1% SDS at 65° C.

[0111] An example of a substantially identical nucleotide sequence to a GP6, LAMA4, CHGB, LOC338749 or TTN nucleotide sequence is one that has a different nucleotide sequence but still encodes the same polypeptide sequence encoded by the GP6, LAMA4, CHGB, LOC338749 or TTN nucleotide sequence. Another example is a nucleotide sequence that encodes a polypeptide having a polypeptide sequence that is more than 70% or more identical to, sometimes 75% or more, 80% or more, or 85% or more identical to, and often 90% or more and 95% or more identical to a polypeptide sequence encoded by a GP6, LAMA4, CHGB, LOC338749 or TTN nucleotide sequence.

[0112] GP6, LAMA4, CHGB, LOC338749 or TTN nucleotide sequences and GP6, LAMA4, CHGB, LOC338749 or TTN amino acid sequences can be used as “query sequences” to perform a search against public databases to identify other family members or related sequences, for example. Such searches can be performed using the NBLAST and XBLAST programs (version 2.0) of Altschul et al., J. Mol. Biol. 215: 403-10 (1990). BLAST nucleotide searches can be performed with the NBLAST program, score=100, wordlength=12 to obtain nucleotide sequences homologous to nucleotide sequences from SEQ ID NO: 1-11. BLAST polypeptide searches can be performed with the XBLAST program, score=50, wordlength=3 to obtain amino acid sequences homologous to polypeptides encoded by a GP6, LAMA4, CHGB, LOC338749 or TTN nucleotide sequence. To obtain gapped alignments for comparison purposes, Gapped BLAST can be utilized as described in Altschul et al., Nucleic Acids Res. 25(17): 3389-3402 (1997). When utilizing BLAST and Gapped BLAST programs, default parameters of the respective programs (e.g., XBLAST and NBLAST) can be used (see the http address www.ncbi.nlm.nih.gov).

[0113] A nucleic acid that is substantially identical to a GP6, LAMA4, CHGB, LOC338749 or TTN nucleotide sequence may include polymorphic sites at positions equivalent to those described herein when the sequences are aligned. For example, using the alignment procedures described herein, SNPs in a sequence substantially identical to a sequence in SEQ ID NO: 1-11 can be identified at nucleotide positions that match (i.e., align) with nucleotides at SNP positions in the nucleotide sequence of SEQ ID NO: 1-11. Also, where a polymorphic variation results in an insertion or deletion, insertion or deletion of a nucleotide sequence from a reference sequence can change the relative positions of other polymorphic sites in the nucleotide sequence.

[0114] Substantially identical nucleotide and polypeptide sequences include those that are naturally occurring, such as allelic variants (same locus), splice variants, homologs (different locus), and orthologs (different organism) or can be non-naturally occurring. Non-naturally occurring variants can be generated by mutagenesis techniques, including those applied to polynucleotides, cells, or organisms. The variants can contain nucleotide substitutions, deletions, inversions and insertions. Variation can occur in either or both the coding and non-coding regions. The variations can produce both conservative and non-conservative amino acid substitutions (as compared in the encoded product). Orthologs, homologs, allelic variants, and splice variants can be identified using methods known in the art. These variants normally comprise a nucleotide sequence encoding a polypeptide that is 50% or more, about 55% or more, often about 70-75% or more, more often about 80-85% or more, and typically about 90-95% or more identical to the amino acid sequences of target polypeptides or a fragment thereof. Such nucleic acid molecules readily can be identified as being able to hybridize under stringent conditions to a nucleotide sequence in SEQ ID NO: 1-11 or a fragment thereof. Nucleic acid molecules corresponding to orthologs, homologs, and allelic variants of a nucleotide sequence in SEQ ID NO: 1-11 can be identified by mapping the sequence to the same chromosome or locus as the nucleotide sequence in SEQ ID NO: 1-11.

[0115] Also, substantially identical nucleotide sequences may include codons that are altered with respect to the naturally occurring sequence for enhancing expression of a target polypeptide in a particular expression system. For example, the nucleic acid can be one in which one or more codons are altered, and often 10% or more or 20% or more of the codons are altered for optimized expression in bacteria (e.g., E. coli.), yeast (e.g., S. cervesiae), human (e.g., 293 cells), insect, or rodent (e.g., hamster) cells.

[0116] Methods for Identifying Subjects at Risk of Breast Cancer and Breast Cancer Risk in a Subject

[0117] Methods for prognosing and diagnosing breast cancer in subjects are provided herein. These methods include detecting the presence or absence of one or more polymorphic variations associated with breast cancer in a nucleotide sequence set forth in SEQ ID NO: 1-5, or substantially identical sequence thereof, in a sample from a subject, where the presence of a polymorphic variant is indicative of a risk of breast cancer.

[0118] Thus, featured herein is a method for detecting a subject at risk of breast cancer or the risk of breast cancer in a subject, which comprises detecting the presence or absence of a polymorphic variation associated with breast cancer at a polymorphic site in a nucleotide sequence set forth in SEQ ID NO: 1-5 in a nucleic acid sample from a subject, where the nucleotide sequence comprises a polynucleotide sequence selected from the group consisting of: (a) a nucleotide sequence set forth in SEQ ID NO: 1-5; (b) a nucleotide sequence which encodes a polypeptide having an amino acid sequence encoded by a nucleotide sequence in SEQ ID NO: 1-5; (c) a nucleotide sequence which encodes a polypeptide that is 90% or more identical to an amino acid sequence encoded by a nucleotide sequence in SEQ ID NO: 1-5 or a nucleotide sequence about 90% or more identical to the nucleotide sequence set forth in SEQ ID NO: 1-5; and (d) a fragment of a nucleotide sequence of (a), (b), or (c), often a fragment that includes a polymorphic site associated with breast cancer; whereby the presence of the polymorphic variation is indicative of a risk of breast cancer in the subject. In certain embodiments, determining the presence of a combination of two or more polymorphic variants associated with breast cancer in one or more nucleotide sequences of the sample is determined to identify a subject at risk of breast cancer and/or risk of breast cancer.

[0119] A risk of developing aggressive forms of breast cancer likely to metastasize or invade surrounding tissues (e.g., Stage IIIA, IIIB, and IV breast cancers), and subjects at risk of developing aggressive forms of breast cancer also may be identified by the methods described herein. These methods include collecting phenotype information from subjects having breast cancer, which includes the stage of progression of the breast cancer, and performing a secondary phenotype analysis to detect the presence or absence of one or more polymorphic variations associated with a particular stage form of breast cancer. Thus, detecting the presence or absence of one or more polymorphic variations in a GP6, LAMA4, CHGB, LOC338749 or TTN nucleotide sequence associated with a late stage form of breast cancer often is prognostic and/or diagnostic of an aggressive form of the cancer.

[0120] Results from prognostic tests may be combined with other test results to diagnose breast cancer. For example, prognostic results may be gathered, a patient sample may be ordered based on a determined predisposition to breast cancer, the patient sample is analyzed,-and the results of the analysis may be utilized to diagnose breast cancer. Also breast cancer diagnostic methods can be developed from studies used to generate prognostic/diagnostic methods in which populations are stratified into subpopulations having different progressions of breast cancer. In another embodiment, prognostic results may be gathered; a patient's risk factors for developing breast cancer analyzed (e.g., age, race, family history, age of first menstrual cycle, age at birth of first child); and a patient sample may be ordered based on a determined predisposition to breast cancer. In an alternative embodiment, the results from predisposition analyses described herein may be combined with other test results indicative of breast cancer, which were previously, concurrently, or subsequently gathered with respect to the predisposition testing. In these embodiments, the combination of the prognostic test results with other test results can be probative of breast cancer, and the combination can be utilized as a breast cancer diagnostic. The results of any test indicative of breast cancer known in the art may be combined with the methods described herein. Examples of such tests are mammography (e.g., a more frequent and/or earlier mammography regimen may be prescribed); breast biopsy and optionally a biopsy from another tissue; breast ultrasound and optionally an ultrasound analysis of another tissue; breast magnetic resonance imaging (MRI) and optionally an MRI analysis of another tissue; electrical impedance (T-scan) analysis of breast and optionally of another tissue; ductal lavage; nuclear medicine analysis (e.g., scintimammography); BRCA1 and/or BRCA2 sequence analysis results; and thermal imaging of the breast and optionally of another tissue. Testing may be performed on tissue other than breast to diagnose the occurrence of metastasis (e.g., testing of the lymph node).

[0121] Risk of breast cancer sometimes is expressed as a probability, such as an odds ratio, percentage, or risk factor. The risk is based upon the presence or absence of one or more polymorphic variants described herein, and also may be based in part upon phenotypic traits of the individual being tested. Methods for calculating predispositions based upon patient data are well known (see, e.g., Agresti, Categorical Data Analysis, 2nd Ed. 2002. Wiley). Allelotyping and genotyping analyses may be carried out in populations other than those exemplified herein to enhance the predictive power of the prognostic method. These further analyses are executed in view of the exemplified procedures described herein, and may be based upon the same polymorphic variations or additional polymorphic variations. Risk determinations for breast cancer are useful in a variety of applications. In one embodiment, breast cancer risk determinations are used by clinicians to direct appropriate detection, preventative and treatment procedures to subjects who most require these. In another embodiment, breast cancer risk determinations are used by health insurers for preparing actuarial tables and for calculating insurance premiums.

[0122] The nucleic acid sample typically is isolated from a biological sample obtained from a subject. For example, nucleic acid can be isolated from blood, saliva, sputum, urine, cell scrapings, and biopsy tissue. The nucleic acid sample can be isolated from a biological sample using standard techniques, such as the technique described in Example 2. As used herein, the term “subject” refers primarily to humans but also refers to other mammals such as dogs, cats, and ungulates (e.g., cattle, sheep, and swine). Subjects also include avians (e.g., chickens and turkeys), reptiles, and fish (e.g., salmon), as embodiments described herein can be adapted to nucleic acid samples isolated from any of these organisms. The nucleic acid sample may be isolated from the subject and then directly utilized in a method for determining the presence of a polymorphic variant, or alternatively, the sample may be isolated and then stored (e.g., frozen) for a period of time before being subjected to analysis.

[0123] The presence or absence of a polymorphic variant is determined using one or both chromosomal complements represented in the nucleic acid sample. Determining the presence or absence of a polymorphic variant in both chromosomal complements represented in a nucleic acid sample from a subject having a copy of each chromosome is useful for determining the zygosity of an individual for the polymorphic variant (i.e., whether the individual is homozygous or heterozygous for the polymorphic variant). Any oligonucleotide-based diagnostic may be utilized to determine whether a sample includes the presence or absence of a polymorphic variant in a sample. For example, primer extension methods, ligase sequence determination methods (e.g., U.S. Pat. Nos. 5,679,524 and 5,952,174, and WO 01/27326), mismatch sequence determination methods (e.g., U.S. Pat. Nos. 5,851,770; 5,958,692; 6,110,684; and 6,183,958), microarray sequence determination methods, restriction fragment length polymorphism (RFLP), single strand conformation polymorphism detection (SSCP) (e.g., U.S. Pat. Nos. 5,891,625 and 6,013,499), PCR-based assays (e.g., TAQMAN® PCR System (Applied Biosystems)), and nucleotide sequencing methods may be used.

[0124] Oligonucleotide extension methods typically involve providing a pair of oligonucleotide primers in a polymerase chain reaction (PCR) or in other nucleic acid amplification methods for the purpose of amplifying a region from the nucleic acid sample that comprises the polymorphic variation. One oligonucleotide primer is complementary to a region 3′ of the polymorphism and the other is complementary to a region 5′ of the polymorphism. A PCR primer pair may be used in methods disclosed in U.S. Pat. Nos. 4,683,195; 4,683,202, 4,965,188; 5,656,493; 5,998,143; 6,140,054; WO 01/27327; and WO 01/27329 for example. PCR primer pairs may also be used in any commercially available machines that perform PCR, such as any of the GENEAMP® Systems available from Applied Biosystems. Also, those of ordinary skill in the art will be able to design oligonucleotide primers based upon a nucleotide sequence set forth in SEQ ID NO: 1-5 without undue experimentation using knowledge readily available in the art.

[0125] Also provided is an extension oligonucleotide that hybridizes to the amplified fragment adjacent to the polymorphic variation. As used herein, the term “adjacent” refers to the 3′ end of the extension oligonucleotide being often 1 nucleotide from the 5′ end of the polymorphic site, and sometimes 2, 3, 4, 5, 6, 7, 8, 9, or 10 nucleotides from the 5′ end of the polymorphic site, in the nucleic acid when the extension oligonucleotide is hybridized to the nucleic acid. The extension oligonucleotide then is extended by one or more nucleotides, and the number and/or type of nucleotides that are added to the extension oligonucleotide determine whether the polymorphic variant is present. Oligonucleotide extension methods are disclosed, for example, in U.S. Pat. Nos. 4,656,127; 4,851,331; 5,679,524; 5,834,189; 5,876,934; 5,908,755; 5,912,118; 5,976,802; 5,981,186; 6,004,744; 6,013,431; 6,017,702; 6,046,005; 6,087,095; 6,210,891; and WO 01/20039. Oligonucleotide extension methods using mass spectrometry are described, for example, in U.S. Pat. Nos. 5,547,835; 5,605,798; 5,691,141; 5,849,542; 5,869,242; 5,928,906; 6,043,031; and 6,194,144, and a method often utilized is described herein in Example 2. Multiple extension oligonucleotides may be utilized in one reaction, which is referred to herein as “multiplexing.”

[0126] A microarray can be utilized for determining whether a polymorphic variant is present or absent in a nucleic acid sample. A microarray may include any oligonucleotides described herein, and methods for making and using oligonucleotide microarrays suitable for diagnostic use are disclosed in U.S. Pat. Nos. 5,492,806; 5,525,464; 5,589,330; 5,695,940; 5,849,483; 6,018,041; 6,045,996; 6,136,541; 6,142,681; 6,156,501; 6,197,506; 6,223,127; 6,225,625; 6,229,911; 6,239,273; WO 00/52625; WO 01/25485; and WO 01/29259. The microarray typically comprises a solid support and the oligonucleotides may be linked to this solid support by covalent bonds or by non-covalent interactions. The oligonucleotides may also be linked to the solid support directly or by a spacer molecule. A microarray may comprise one or more oligonucleotides complementary to a polymorphic site set forth in SEQ ID NO: 1-5 or below.

[0127] A kit also may be utilized for determining whether a polymorphic variant is present or absent in a nucleic acid sample. A kit often comprises one or more pairs of oligonucleotide primers useful for amplifying a fragment of a GP6, LAMA4, CHGB, LOC338749 or TTN nucleotide sequence or a substantially identical sequence thereof, where the fragment includes a polymorphic site. The kit sometimes comprises a polymerizing agent, for example, a thermostable nucleic acid polymerase such as one disclosed in U.S. Pat. Nos. 4,889,818 or 6,077,664. Also, the kit often comprises an elongation oligonucleotide that hybridizes to a GP6, LAMA4, CHGB, LOC338749 or TTN nucleotide sequence in a nucleic acid sample adjacent to the polymorphic site. Where the kit includes an elongation oligonucleotide, it also often comprises chain elongating nucleotides, such as dATP, dTTP, dGTP, dCTP, and dITP, including analogs of dATP, dTTP, dGTP, dCTP and dITP, provided that such analogs are substrates for a thermostable nucleic acid polymerase and can be incorporated into a nucleic acid chain elongated from the extension oligonucleotide. Along with chain elongating nucleotides would be one or more chain terminating nucleotides such as ddATP, ddTTP, ddGTP, ddCTP, and the like. In an embodiment, the kit comprises one or more oligonucleotide primer pairs, a polymerizing agent, chain elongating nucleotides, at least one elongation oligonucleotide, and one or more chain terminating nucleotides. Kits optionally include buffers, vials, microtiter plates, and instructions for use.

[0128] An individual identified as being at risk of breast cancer may be heterozygous or homozygous with respect to the allele associated with a higher risk of breast cancer. A subject homozygous for an allele associated with an increased risk of breast cancer is at a comparatively high risk of breast cancer, a subject heterozygous for an allele associated with an increased risk of breast cancer is at a comparatively intermediate risk of breast cancer, and a subject homozygous for an allele associated with a decreased risk of breast cancer is at a comparatively low risk of breast cancer. A genotype may be assessed for a complementary strand, such that the complementary nucleotide at a particular position is detected.

[0129] Also featured are methods for determining risk of breast cancer and/or identifying a subject at risk of breast cancer by contacting a polypeptide or protein encoded by a GP6, LAMA4, CHGB, LOC338749 or TTN nucleotide sequence from a subject with an antibody that specifically binds to an epitope associated with increased risk of breast cancer in the polypeptide. In certain embodiments, the antibody specifically binds to an epitope that comprises a lysine at amino acid position 237 of SEQ ID NO: 12, a proline at amino acid position 413 of SEQ ID NO: 16 or a glutamine at amino acid position 63 of SEQ ID NO: 16.

[0130] Applications of Prognostic and Diagnostic Results to Pharmacogenomic Methods

[0131] Pharmacogenomics is a discipline that involves tailoring a treatment for a subject according to the subject's genotype. For example, based upon the outcome of a prognostic test described herein, a clinician or physician may target pertinent information and preventative or therapeutic treatments to a subject who would be benefited by the information or treatment and avoid directing such information and treatments to a subject who would not be benefited (e.g., the treatment has no therapeutic effect and/or the subject experiences adverse side effects). As therapeutic approaches for breast cancer continue to evolve and improve, the goal of treatments for breast cancer related disorders is to intervene even before clinical signs (e.g., identification of lump in the breast) first manifest. Thus, genetic markers associated with susceptibility to breast cancer prove useful for early diagnosis, prevention and treatment of breast cancer.

[0132] The following is an example of a pharmacogenomic embodiment. A particular treatment regimen can exert a differential effect depending upon the subject's genotype. Where a candidate therapeutic exhibits a significant interaction with a major allele and a comparatively weak interaction with a minor allele (e.g., an order of magnitude or greater difference in the interaction), such a therapeutic typically would not be administered to a subject genotyped as being homozygous for the minor allele, and sometimes not administered to a subject genotyped as being heterozygous for the minor allele. In another example, where a candidate therapeutic is not significantly toxic when administered to subjects who are homozygous for a major allele but is comparatively toxic when administered to subjects heterozygous or homozygous for a minor allele, the candidate therapeutic is not typically administered to subjects who are genotyped as being heterozygous or homozygous with respect to the minor allele.

[0133] The methods described herein are applicable to pharmacogenomic methods for detecting, preventing, alleviating and/or treating breast cancer. For example, a nucleic acid sample from an individual may be subjected to a genetic test described herein. Where one or more polymorphic variations associated with increased risk of breast cancer are identified in a subject, information for detecting, preventing or treating breast cancer and/or one or more breast cancer detection, prevention and/or treatment regimens then may be directed to and/or prescribed to that subject.

[0134] In certain embodiments, a detection, prevenative and/or treatment regimen is specifically prescribed and/or administered to individuals who will most benefit from it based upon their risk of developing breast cancer assessed by the methods described herein. Thus, provided are methods for identifying a subject at risk of breast cancer and then prescribing a detection, therapeutic or preventative regimen to individuals identified as being at risk of breast cancer. Thus, certain embodiments are directed to methods for treating breast cancer in a subject, reducing risk of breast cancer in a subject, or early detection of breast cancer in a subject, which comprise: detecting the presence or absence of a polymorphic variant associated with breast cancer in a nucleic acid sample from a subject, where the nucleotide sequence comprises a polynucleotide sequence selected from the group consisting of: (a) a nucleotide sequence set forth in SEQ ID NO: 1-5; (b) a nucleotide sequence which encodes a polypeptide having an amino acid sequence encoded by a nucleotide sequence in SEQ ID NO: 1-5; (c) a nucleotide sequence which encodes a polypeptide that is 90% or more identical to an amino acid sequence encoded by a nucleotide sequence in SEQ ID NO: 1-5 or a nucleotide sequence about 90% or more identical to the nucleotide sequence set forth in SEQ ID NO: 1-5; and (d) a fragment of a nucleotide sequence of (a), (b), or (c), sometimes comprising a polymorphic site associated with breast cancer; and prescribing or administering a breast cancer treatment regimen, preventative regimen and/or detection regimen to a subject from whom the sample originated where the presence of one or more polymorphic variations associated with breast cancer are detected in the nucleotide sequence. In these methods, genetic results may be utilized in combination with other test results to diagnose breast cancer as described above. Other test results include but are not limited to mammography results, imaging results, biopsy results and results from BRCA1 or BRAC2 test results, as described above.

[0135] Detection regimens include one or more mammography procedures, a regular mammography regimen (e.g., once a year, or once every six, four, three or two months); an early mammography regimen (e.g., mammography tests are performed beginning at age 25, 30, or 35); one or more biopsy procedures (e.g., a regular biopsy regimen beginning at age 40); breast biopsy and biopsy from other tissue; breast ultrasound and optionally ultrasound analysis of another tissue; breast magnetic resonance imaging (MRI) and optionally MRI analysis of another tissue; electrical impedance (T-scan) analysis of breast and optionally another tissue; ductal lavage; nuclear medicine analysis (e.g., scintimammography); BRCA1 and/or BRCA2 sequence analysis results; and/or thermal imaging of the breast and optionally another tissue.

[0136] Treatments sometimes are preventative (e.g., is prescribed or administered to reduce the probability that a breast cancer associated condition arises or progresses), sometimes are therapeutic, and sometimes delay, alleviate or halt the progression of breast cancer. Any known preventative or therapeutic treatment for alleviating or preventing the occurrence of breast cancer is prescribed and/or administered. For example, certain preventative treatments often are prescribed to subjects having a predisposition to breast cancer and where the subject is not diagnosed with breast cancer or is diagnosed as having symptoms indicative of early stage breast cancer (e.g., stage 1). For subjects not diagnosed as having breast cancer, any preventative treatments known in the art can be prescribed and administered, which include selective hormone receptor modulators (e.g., selective estrogen receptor modulators (SERMs) such as tamoxifen, reloxifene, and toremifene); compositions that prevent production of hormones (e.g., aramotase inhibitors that prevent the production of estrogen in the adrenal gland, such as exemestane, letrozole, anastrozol, groserelin, and megestrol); other hormonal treatments (e.g., goserelin acetate and fulvestrant); biologic response modifiers such as antibodies (e.g., trastuzumab (herceptin/HER2)); surgery (e.g., lumpectomy and mastectomy); drugs that delay or halt metastasis (e.g., pamidronate disodium); and alternative/complementary medicine (e.g., acupuncture, acupressure, moxibustion, qi gong, reiki, ayurveda, vitamins, minerals, and herbs (e.g., astragalus root, burdock root, garlic, green tea, and licorice root)).

[0137] The use of breast cancer treatments are well known in the art, and include surgery, chemotherapy and/or radiation therapy. Any of the treatments may be used in combination to treat or prevent breast cancer (e.g., surgery followed by radiation therapy or chemotherapy). Examples of chemotherapy combinations used to treat breast cancer include: cyclophosphamide (Cytoxan), methotrexate (Amethopterin, Mexate, Folex), and fluorouracil (Fluorouracil, 5-Fu, Adrucil), which is referred to as CMF; cyclophosphamide, doxorubicin (Adriamycin), and fluorouracil, which is referred to as CAF; and doxorubicin (Adriamycin) and cyclophosphamide, which is referred to as AC.

[0138] As breast cancer preventative and treatment information can be specifically targeted to subjects in need thereof (e.g., those at risk of developing breast cancer or those that have early signs of breast cancer), provided herein is a method for preventing or reducing the risk of developing breast cancer in a subject, which comprises: (a) detecting the presence or absence of a polymorphic variation associated with breast cancer at a polymorphic site in a nucleotide sequence in a nucleic acid sample from a subject; (b) identifying a subject with a predisposition to breast cancer, whereby the presence of the polymorphic variation is indicative of a predisposition to breast cancer in the subject; and (c) if such a predisposition is identified, providing the subject with information about methods or products to prevent or reduce breast cancer or to delay the onset of breast cancer. Also provided is a method of targeting information or advertising to a subpopulation of a human population based on the subpopulation being genetically predisposed to a disease or condition, which comprises: (a) detecting the presence or absence of a polymorphic variation associated with breast cancer at a polymorphic site in a nucleotide sequence in a nucleic acid sample from a subject; (b) identifying the subpopulation of subjects in which the polymorphic variation is associated with breast cancer; and (c) providing information only to the subpopulation of subjects about a particular product which may be obtained and consumed or applied by the subject to help prevent or delay onset of the disease or condition.

[0139] Pharmacogenomics methods also may be used to analyze and predict a response to a breast cancer treatment or a drug. For example, if pharmacogenomics analysis indicates a likelihood that an individual will respond positively to a breast cancer treatment with a particular drug, the drug may be administered to the individual. Conversely, if the analysis indicates that an individual is likely to respond negatively to treatment with a particular drug, an alternative course of treatment may be prescribed. A negative response may be defined as either the absence of an efficacious response or the presence of toxic side effects. The response to a therapeutic treatment can be predicted in a background study in which subjects in any of the following populations are genotyped: a population that responds favorably to a treatment regimen, a population that does not respond significantly to a treatment regimen, and a population that responds adversely to a treatment regiment (e.g., exhibits one or more side effects). These populations are provided as examples and other populations and subpopulations may be analyzed. Based upon the results of these analyses, a subject is genotyped to predict whether he or she will respond favorably to a treatment regimen, not respond significantly to a treatment regimen, or respond adversely to a treatment regimen.

[0140] The methods described herein also are applicable to clinical drug trials. One or more polymorphic variants indicative of response to an agent for treating breast cancer or to side effects to an agent for treating breast cancer may be identified using the methods described herein. Thereafter, potential participants in clinical trials of such an agent may be screened to identify those individuals most likely to respond favorably to the drug and exclude those likely to experience side effects. In that way, the effectiveness of drug treatment may be measured in individuals who respond positively to the drug, without lowering the measurement as a result of the inclusion of individuals who are unlikely to respond positively in the study and without risking undesirable safety problems. In certain embodiments, the agent for treating breast cancer described herein targets GP6, LAMA4, CHGB, LOC338749 or TTN or a target in the GP6, LAMA4, CHGB, LOC338749 or TTN pathway.

[0141] Thus, another embodiment is a method of selecting an individual for inclusion in a clinical trial of a treatment or drug comprising the steps of: (a) obtaining a nucleic acid sample from an individual; (b) determining the identity of a polymorphic variation which is associated with a positive response to the treatment or the drug, or at least one polymorphic variation which is associated with a negative response to the treatment or the drug in the nucleic acid sample, and (c) including the individual in the clinical trial if the nucleic acid sample contains said polymorphic variation associated with a positive response to the treatment or the drug or if the nucleic acid sample lacks said polymorphic variation associated with a negative response to the treatment or the drug. In addition, the methods for selecting an individual for inclusion in a clinical trial of a treatment or drug encompass methods with any further limitation described in this disclosure, or those following, specified alone or in any combination. The polymorphic variation may be in a sequence selected individually or in any combination from the group consisting of (i) a polynucleotide sequence set forth in SEQ ID NO: 1-5; (ii) a polynucleotide sequence that is 90% or more identical to a nucleotide sequence set forth in SEQ ID NO: 1-5; (iii) a polynucleotide sequence that encodes a polypeptide having an amino acid sequence identical to or 90% or more identical to an amino acid sequence encoded by a nucleotide sequence set forth in SEQ ID NO: 1-5; and (iv) a fragment of a polynucleotide sequence of (i), (ii), or (iii) comprising the polymorphic site. The including step (c) optionally comprises administering the drug or the treatment to the individual if the nucleic acid sample contains the polymorphic variation associated with a positive response to the treatment or the drug and the nucleic acid sample lacks said biallelic marker associated with a negative response to the treatment or the drug.

[0142] Also provided herein is a method of partnering between a diagnostic/prognostic testing provider and a provider of a consumable product, which comprises: (a) the diagnostic/prognostic testing provider detects the presence or absence of a polymorphic variation associated with breast cancer at a polymorphic site in a nucleotide sequence in a nucleic acid sample from a subject; (b) the diagnostic/prognostic testing provider identifies the subpopulation of subjects in which the polymorphic variation is associated with breast cancer; (c) the diagnostic/prognostic testing provider forwards information to the subpopulation of subjects about a particular product which may be obtained and consumed or applied by the subject to help prevent or delay onset of the disease or condition; and (d) the provider of a consumable product forwards to the diagnostic test provider a fee every time the diagnostic/prognostic test provider forwards information to the subject as set forth in step (c) above.

[0143] Compositions Comprising Breast Cancer-Directed Molecules

[0144] Featured herein is a composition comprising a breast cancer cell and one or more molecules specifically directed and targeted to a nucleic acid comprising a GP6, LAMA4, CHGB, LOC338749 or TTN nucleotide sequence or a GP6, LAMA4, CHGB, LOC338749 or TTN polypeptide. Such directed molecules include, but are not limited to, a compound that binds to a GP6, LAMA4, CHGB, LOC338749 or TTN nucleic acid or a GP6, LAMA4, CHGB, LOC338749 or TTN polypeptide; a RNAi or siRNA molecule having a strand complementary to a GP6, LAMA4, CHGB, LOC338749 or TTN nucleotide sequence; an antisense nucleic acid complementary to an RNA encoded by a GP6, LAMA4, CHGB, LOC338749 or TTN DNA sequence; a ribozyme that hybridizes to a GP6, LAMA4, CHGB, LOC338749 or TTN nucleotide sequence; a nucleic acid aptamer that specifically binds a GP6, LAMA4, CHGB, LOC338749 or TTN polypeptide; and an antibody that specifically binds to a GP6, LAMA4, CHGB, LOC338749 or TTN polypeptide or binds to a GP6, LAMA4, CHGB, LOC338749 or TTN nucleic acid. In certain embodiments, the antibody specifically binds to an epitope that comprises a a lysine at amino acid position 237 of SEQ ID NO: 12, a proline at amino acid position 413 of SEQ ID NO: 16 or a glutamine at amino acid position 63 of SEQ ID NO: 16. In specific embodiments, the breast cancer directed molecule interacts with a GP6, LAMA4, CHGB, LOC338749 or TTN nucleic acid or polypeptide variant associated with breast cancer. In other embodiments, the breast cancer directed molecule interacts with a polypeptide involved in the GP6, LAMA4, CHGB, LOC338749 or TTN signal pathway, or a nucleic acid encoding such a polypeptide. Polypeptides involved in the GP6, LAMA4, CHGB, LOC338749 or TTN signal pathway are discussed herein.

[0145] Compositions sometimes include an adjuvant known to stimulate an immune response, and in certain embodiments, an adjuvant that stimulates a T-cell lymphocyte response. Adjuvants are known, including but not limited to an aluminum adjuvant (e.g., aluminum hydroxide); a cytokine adjuvant or adjuvant that stimulates a cytokine response (e.g., interleukin (IL)-12 and/or γ-interferon cytokines); a Freund-type mineral oil adjuvant emulsion (e.g., Freund's complete or incomplete adjuvant); a synthetic lipoid compound; a copolymer adjuvant (e.g., TitreMax); a saponin; Quil A; a liposome; an oil-in-water emulsion (e.g., an emulsion stabilized by Tween 80 and pluronic polyoxyethlene/polyoxypropylene block copolymer (Syntex Adjuvant Formulation); TitreMax; detoxified endotoxin (MPL) and mycobacterial cell wall components (TDW, CWS) in 2% squalene (Ribi Adjuvant System)); a muramyl dipeptide; an immune-stimulating complex (ISCOM, e.g., an Ag-modified saponin/cholesterol micelle that forms stable cage-like structure); an aqueous phase adjuvant that does not have a depot effect (e.g., Gerbu adjuvant); a carbohydrate polymer (e.g., AdjuPrime); L-tyrosine; a manide-oleate compound (e.g., Montanide); an ethylene-vinyl acetate copolymer (e.g., Elvax 40W1,2); or lipid A, for example. Such compositions are useful for generating an immune response against a breast cancer directed molecule (e.g., an HLA-binding subsequence within a polypeptide encoded by a nucleotide sequence in SEQ ID NO: 1-5). In such methods, a peptide having an amino acid subsequence of a polypeptide encoded by a nucleotide sequence in SEQ ID NO: 1-5 is delivered to a subject, where the subsequence binds to an HLA molecule and induces a CTL lymphocyte response. The peptide sometimes is delivered to the subject as an isolated peptide or as a minigene in a plasmid that encodes the peptide. Methods for identifying HLA-binding subsequences in such polypeptides are known (see e.g., publication WO02/20616 and PCT application US98/01373 for methods of identifying such sequences).

[0146] The breast cancer cell may be in a group of breast cancer cells and/or other types of cells cultured in vitro or in a tissue having breast cancer cells (e.g., a melanocytic lesion) maintained in vitro or present in an animal in vivo (e.g., a rat, mouse, ape or human). In certain embodiments, a composition comprises a component from a breast cancer cell or from a subject having a breast cancer cell instead of the breast cancer cell or in addition to the breast cancer cell, where the component sometimes is a nucleic acid molecule (e.g., genomic DNA), a protein mixture or isolated protein, for example. The aforementioned compositions have utility in diagnostic, prognostic and pharmacogenomic methods described previously and in breast cancer therapeutics described hereafter. Certain breast cancer molecules are described in greater detail below.

[0147] Compounds

[0148] Compounds can be obtained using any of the numerous approaches in combinatorial library methods known in the art, including: biological libraries; peptoid libraries (libraries of molecules having the functionalities of peptides, but with a novel, non-peptide backbone which are resistant to enzymatic degradation but which nevertheless remain bioactive (see, e.g., Zuckermann et al., J. Med. Chem.37: 2678-85 (1994)); spatially addressable parallel solid phase or solution phase libraries; synthetic library methods requiring deconvolution; “one-bead one-compound” library methods; and synthetic library methods using affinity chromatography selection. Biological library and peptoid library approaches are typically limited to peptide libraries, while the other approaches are applicable to peptide, non-peptide oligomer or small molecule libraries of compounds (Lam, Anticancer Drug Des. 12: 145, (1997)). Examples of methods for synthesizing molecular libraries are described, for example, in DeWitt et al, Proc. Natl. Acad. Sci. U.S.A. 90: 6909 (1993); Erb et al., Proc. Natl. Acad. Sci. USA 91: 11422 (1994); Zuckermann et al., J. Med. Chem. 37: 2678 (1994); Cho et al, Science 261: 1303 (1993); Carrell et al., Angew. Chem. Int. Ed. Engl. 33: 2059 (1994); Carell et al., Angew. Chem. Int. Ed. Engl. 33: 2061 (1994); and in Gallop et al., J. Med. Chem. 37: 1233 (1994).

[0149] Libraries of compounds may be presented in solution (e.g., Houghten, Biotechniques 13: 412-421 (1992)), or on beads (Lam, Nature 354: 82-84 (1991)), chips (Fodor, Nature 364: 555-556 (1993)), bacteria or spores (Ladner, U.S. Pat. No. 5,223,409), plasmids (Cull et al., Proc. Natl. Acad. Sci. USA 89: 1865-1869 (1992)) or on phage (Scott and Smith, Science 249: 386-390 (1990); Devlin, Science 249: 404-406 (1990); Cwirla et al., Proc. Natl. Acad. Sci. 87: 6378-6382 (1990); Felici, J. Mol. Biol. 222: 301-310 (1991); Ladner supra.).

[0150] A compound sometimes alters expression and sometimes alters activity of a GP6, LAMA4, CHGB, LOC338749 or TTN polypeptide and may be a small molecule. Small molecules include, but are not limited to, peptides, peptidomimetics (e.g., peptoids), amino acids, amino acid analogs, polynucleotides, polynucleotide analogs, nucleotides, nucleotide analogs, organic or inorganic compounds (i.e., including heteroorganic and organometallic compounds) having a molecular weight less than about 10,000 grams per mole, organic or inorganic compounds having a molecular weight less than about 5,000 grams per mole, organic or inorganic compounds having a molecular weight less than about 1,000 grams per mole, organic or inorganic compounds having a molecular weight less than about 500 grams per mole, and salts, esters, and other pharmaceutically acceptable forms of such compounds.

[0151] Antisense Nucleic Acid Molecules, Ribozymes, RNAi, siRNA and Modified Nucleic Acid Molecules

[0152] An “antisense” nucleic acid refers to a nucleotide sequence complementary to a “sense” nucleic acid encoding a polypeptide, e.g., complementary to the coding strand of a double-stranded cDNA molecule or complementary to an mRNA sequence. The antisense nucleic acid can be complementary to an entire coding strand in SEQ ID NO: 1-11, or to a portion thereof or a substantially identical sequence thereof. In another embodiment, the antisense nucleic acid molecule is antisense to a “noncoding region” of the coding strand of a nucleotide sequence in SEQ ID NO: 1-11 (e.g., 5′ and 3′ untranslated regions).

[0153] An antisense nucleic acid can be designed such that it is complementary to the entire coding region of an mRNA encoded by a nucleotide sequence in SEQ ID NO: 1-5 (e.g., SEQ ID NO: 6-11), and often the antisense nucleic acid is an oligonucleotide antisense to only a portion of a coding or noncoding region of the mRNA. For example, the antisense oligonucleotide can be complementary to the region surrounding the translation start site of the mRNA, e.g., between the −10 and +10 regions of the target gene nucleotide sequence of interest. An antisense oligonucleotide can be, for example, about 7, 10, 15, 20, 25, 30, 35, 40, 45, 50, 55, 60, 65, 70, 75, 80, or more nucleotides in length. The antisense nucleic acids, which include the ribozymes described hereafter, can be designed to target a nucleotide sequence in SEQ ID NO: 1-11, often a variant associated with breast cancer, or a substantially identical sequence thereof. Among the variants, minor alleles and major alleles can be targeted, and those associated with a higher risk of breast cancer are often designed, tested, and administered to subjects.

[0154] An antisense nucleic acid can be constructed using chemical synthesis and enzymatic ligation reactions using standard procedures. For example, an antisense nucleic acid (e.g., an antisense oligonucleotide) can be chemically synthesized using naturally occurring nucleotides or variously modified nucleotides designed to increase the biological stability of the molecules or to increase the physical stability of the duplex formed between the antisense and sense nucleic acids, e.g., phosphorothioate derivatives and acridine substituted nucleotides can be used. Antisense nucleic acid also can be produced biologically using an expression vector into which a nucleic acid has been subcloned in an antisense orientation (i.e., RNA transcribed from the inserted nucleic acid will be of an antisense orientation to a target nucleic acid of interest, described further in the following subsection).

[0155] When utilized as therapeutics, antisense nucleic acids typically are administered to a subject (e.g., by direct injection at a tissue site) or generated in situ such that they hybridize with or bind to cellular mRNA and/or genomic DNA encoding a polypeptide and thereby inhibit expression of the polypeptide, for example, by inhibiting transcription and/or translation. Alternatively, antisense nucleic acid molecules can be modified to target selected cells and then are administered systemically. For systemic administration, antisense molecules can be modified such that they specifically bind to receptors or antigens expressed on a selected cell surface, for example, by linking antisense nucleic acid molecules to peptides or antibodies which bind to cell surface receptors or antigens. Antisense nucleic acid molecules can also be delivered to cells using the vectors described herein. Sufficient intracellular concentrations of antisense molecules are achieved by incorporating a strong promoter, such as a pol II or pol III promoter, in the vector construct.

[0156] Antisense nucleic acid molecules sometimes are *-anomeric nucleic acid molecules. An *-anomeric nucleic acid molecule forms specific double-stranded hybrids with complementary RNA in which, contrary to the usual *-units, the strands run parallel to each other (Gaultier et al., Nucleic Acids. Res. 15: 6625-6641 (1987)). Antisense nucleic acid molecules can also comprise a 2′-o-methylribonucleotide (Inoue et al., Nucleic Acids Res. 15: 6131-6148 (1987)) or a chimeric RNA-DNA analogue (Inoue et al., FEBS Lett. 215: 327-330 (1987)). Antisense nucleic acids sometimes are composed of DNA or PNA or any other nucleic acid derivatives described previously.

[0157] In another embodiment, an antisense nucleic acid is a ribozyme. A ribozyme having specificity for a GP6, LAMA4, CHGB, LOC338749 or TTN nucleotide sequence can include one or more sequences complementary to such a nucleotide sequence, and a sequence having a known catalytic region responsible for mRNA cleavage (see e.g., U.S. Pat. No. 5,093,246 or Haselhoff and Gerlach, Nature 334: 585-591 (1988)). For example, a derivative of a Tetrahymena L-19 IVS RNA is sometimes utilized in which the nucleotide sequence of the active site is complementary to the nucleotide sequence to be cleaved in a mRNA (see e.g., Cech et al. U.S. Pat. No. 4,987,071; and Cech et al. U.S. Pat. No. 5,116,742). Also, target mRNA sequences can be used to select a catalytic RNA having a specific ribonuclease activity from a pool of RNA molecules (see e.g., Bartel & Szostak, Science 261: 1411-1418 (1993)).

[0158] Breast cancer directed molecules include in certain embodiments nucleic acids that can form triple helix structures with a GP6, LAMA4, CHGB, LOC338749 or TTN nucleotide sequence or a substantially identical sequence thereof, especially one that includes a regulatory region that controls expression of a polypeptide. Gene expression can be inhibited by targeting nucleotide sequences complementary to the regulatory region of a GP6, LAMA4, CHGB, LOC338749 or TTN nucleotide sequence or a substantially identical sequence (e.g., promoter and/or enhancers) to form triple helical structures that prevent transcription of a gene in target cells (see e.g., Helene, Anticancer Drug Des. 6(6): 569-84 (1991); Helene et al., Ann. N.Y. Acad. Sci. 660: 27-36 (1992); and Maher, Bioassays 14(12): 807-15 (1992). Potential sequences that can be targeted for triple helix formation can be increased by creating a so-called “switchback” nucleic acid molecule. Switchback molecules are synthesized in an alternating 5′-3′, 3′-5′ manner, such that they base pair with first one strand of a duplex and then the other, eliminating the necessity for a sizeable stretch of either purines or pyrimidines to be present on one strand of a duplex.

[0159] Breast cancer directed molecules include RNAi and siRNA nucleic acids. Gene expression may be inhibited by the introduction of double-stranded RNA (dsRNA), which induces potent and specific gene silencing, a phenomenon called RNA interference or RNAi. See, e.g., Fire et al., U.S. Pat. No. 6,506,559; Tuschl et al. PCT International Publication No. WO 01/75164; Kay et al. PCT International Publication No. WO 03/010180A 1; or Bosher J M, Labouesse, Nat Cell Biol February 2000;2(2):E31-6. This process has been improved by decreasing the size of the double-stranded RNA to 20-24 base pairs (to create small-interfering RNAs or siRNAs) that “switched off” genes in mammalian cells without initiating an acute phase response, i.e., a host defense mechanism that often results in cell death (see, e.g., Caplen et al. Proc Natl Acad Sci U S A. Aug. 14, 2001;98(17):9742-7 and Elbashir et al. Methods February 2002;26(2):199-213). There is increasing evidence of post-transcriptional gene silencing by RNA interference (RNAi) for inhibiting targeted expression in mammalian cells at the mRNA level, in human cells. There is additional evidence of effective methods for inhibiting the proliferation and migration of tumor cells in human patients, and for inhibiting metastatic cancer development (see, e.g., U.S. Patent Application No. US2001000993183; Caplen et al. Proc Natl Acad Sci USA; and Abderrahmani et al. Mol Cell Biol Nov. 21, 2001(21):7256-67).

[0160] An “siRNA” or “RNAi” refers to a nucleic acid that forms a double stranded RNA and has the ability to reduce or inhibit expression of a gene or target gene when the siRNA is delivered to or expressed in the same cell as the gene or target gene. “siRNA” refers to short double-stranded RNA formed by the complementary strands. Complementary portions of the siRNA that hybridize to form the double stranded molecule often have substantial or complete identity to the target molecule sequence. In one embodiment, an siRNA refers to a nucleic acid that has substantial or complete identity to a target gene and forms a double stranded siRNA.

[0161] When designing the siRNA molecules, the targeted region often is selected from a given DNA sequence beginning 50 to 100 nucleotides downstream of the start codon. See, e.g., Elbashir et al,. Methods 26:199-213 (2002). Initially, 5′ or 3′ UTRs and regions nearby the start codon were avoided assuming that UTR-binding proteins and/or translation initiation complexes may interfere with binding of the siRNP or RISC endonuclease complex. Sometimes regions of the target 23 nucleotides in length conforming to the sequence motif AA(N19)TT (N, an nucleotide), and regions with approximately 30% to 70% G/C-content (often about 50% G/C-content) often are selected. If no suitable sequences are found, the search often is extended using the motif NA(N21). The sequence of the sense siRNA sometimes corresponds to (N19) TT or N21 (position 3 to 23 of the 23-nt motif), respectively. In the latter case, the 3′ end of the sense siRNA often is converted to TT. The rationale for this sequence conversion is to generate a symmetric duplex with respect to the sequence composition of the sense and antisense 3′ overhangs. The antisense siRNA is synthesized as the complement to position 1 to 21 of the 23-nt motif. Because position 1 of the 23-nt motif is not recognized sequence-specifically by the antisense siRNA, the 3′-most nucleotide residue of the antisense siRNA can be chosen deliberately. However, the penultimate nucleotide of the antisense siRNA (complementary to position 2 of the 23-nt motif) often is complementary to the targeted sequence. For simplifying chemical synthesis, Tr often is utilized. siRNAs corresponding to the target motifNAR(N17)YNN, where R is purine (A,G) and Y is pyrimidine (C,U), often are selected. Respective 21 nucleotide sense and antisense siRNAs often begin with a purine nucleotide and can also be expressed from pol II expression vectors without a change in targeting site. Expression of RNAs from pol III promoters often is efficient when the first transcribed nucleotide is a purine.

[0162] The sequence of the siRNA can correspond to the full length target gene, or a subsequence thereof. Often, the siRNA is about 15 to about 50 nucleotides in length (e.g., each complementary sequence of the double stranded siRNA is 15-50 nucleotides in length, and the double stranded siRNA is about 15-50 base pairs in length, sometimes about 20-30 nucleotides in length or about 20-25 nucleotides in length, e.g., 20, 21, 22, 23, 24, 25, 26, 27, 28, 29, or 30 nucleotides in length. The siRNA sometimes is about 21 nucleotides in length. Methods of using siRNA are well known in the art, and specific siRNA molecules may be purchased from a number of companies including Dharmacon Research, Inc.

[0163] Antisense, ribozyme, RNAi and siRNA nucleic acids can be altered to form modified nucleic acid molecules. The nucleic acids can be altered at base moieties, sugar moieties or phosphate backbone moieties to improve stability, hybridization, or solubility of the molecule. For example, the deoxyribose phosphate backbone of nucleic acid molecules can be modified to generate peptide nucleic acids (see Hyrup et al., Bioorganic & Medicinal Chemistry 4 (1): 5-23 (1996)). As used herein, the terms “peptide nucleic acid” or “PNA” refers to a nucleic acid mimic such as a DNA mimic, in which the deoxyribose phosphate backbone is replaced by a pseudopeptide backbone and only the four natural nucleobases are retained. The neutral backbone of a PNA can allow for specific hybridization to DNA and RNA under conditions of low ionic strength. Synthesis of PNA oligomers can be performed using standard solid phase peptide synthesis protocols as described, for example, in Hyrup et al., (1996) supra and Perry-O'Keefe et al., Proc. Natl. Acad. Sci. 93: 14670-675 (1996).

[0164] PNA nucleic acids can be used in prognostic, diagnostic, and therapeutic applications. For example, PNAs can be used as antisense or antigene agents for sequence-specific modulation of gene expression by, for example, inducing transcription or translation arrest or inhibiting replication. PNA nucleic acid molecules can also be used in the analysis of single base pair mutations in a gene, (e.g., by PNA-directed PCR clamping); as “artificial restriction enzymes” when used in combination with other enzymes, (e.g., SI nucleases (Hyrup (1996) supra)); or as probes or primers for DNA sequencing or hybridization (Hyrup et al., (1996) supra; Perry-O'Keefe supra).

[0165] In other embodiments, oligonucleotides may include other appended groups such as peptides (e.g., for targeting host cell receptors in vivo), or agents facilitating transport across cell membranes (see e.g., Letsinger et al., Proc. Natl. Acad. Sci. USA 86: 6553-6556 (1989); Lemaitre et al., Proc. Natl. Acad. Sci. USA 84: 648-652 (1987); PCT Publication No. W088/09810) or the blood-brain barrier (see, e.g., PCT Publication No. W089/10134). In addition, oligonucleotides can be modified with hybridization- triggered cleavage agents (See, e.g., Krol et al., Bio-Techniques 6: 958-976 (1988)) or intercalating agents. (See, e.g., Zon, Pharm. Res. 5: 539-549 (1988) ). To this end, the oligonucleotide may be conjugated to another molecule, (e.g., a peptide, hybridization triggered cross-linking agent, transport agent, or hybridization-triggered cleavage agent).

[0166] Also included herein are molecular beacon oligonucleotide primer and probe molecules having one or more regions complementary to a nucleotide sequence of SEQ ID NO: 1-11 or a substantially identical sequence thereof, two complementary regions one having a fluorophore and one a quencher such that the molecular beacon is useful for quantifying the presence of the nucleic acid in a sample. Molecular beacon nucleic acids are described, for example, in Lizardi et al., U.S. Pat. No. 5,854,033; Nazarenko et al., U.S. Pat. No. 5,866,336, and Livak et al., U.S. Pat. No. 5,876,930.

[0167] Antibodies

[0168] The term “antibody” as used herein refers to an immunoglobulin molecule or immunologically active portion thereof, i.e., an antigen-binding portion. Examples of immunologically active portions of immunoglobulin molecules include F(ab) and F(ab′)₂ fragments which can be generated by treating the antibody with an enzyme such as pepsin. An antibody sometimes is a polyclonal, monoclonal, recombinant (e.g., a chimeric or humanized), filly human, non-human (e.g., murine), or a single chain antibody. An antibody may have effector function and can fix complement, and is sometimes coupled to a toxin or imaging agent.

[0169] A full-length polypeptide or antigenic peptide fragment encoded by a GP6, LAMA4, CHGB, LOC338749 or TTN nucleotide sequence can be used as an immunogen or can be used to identify antibodies made with other immunogens, e.g., cells, membrane preparations, and the like. An antigenic peptide often includes at least 8 amino acid residues of the amino acid sequences encoded by a nucleotide sequence of SEQ ID NO: 1-11, or substantially identical sequence thereof, and encompasses an epitope. Antigenic peptides sometimes include 10 or more amino acids, 15 or more amino acids, 20 or more amino acids, or 30 or more amino acids. Hydrophilic and hydrophobic fragments of polypeptides sometimes are used as immunogens.

[0170] Epitopes encompassed by the antigenic peptide are regions located on the surface of the polypeptide (e.g., hydrophilic regions) as well as regions with high antigenicity. For example, an Emini surface probability analysis of the human polypeptide sequence can be used to indicate the regions that have a particularly high probability of being localized to the surface of the polypeptide and are thus likely to constitute surface residues useful for targeting antibody production. The antibody may bind an epitope on any domain or region on polypeptides described herein.

[0171] Also, chimeric, humanized, and completely human antibodies are useful for applications which include repeated administration to subjects. Chimeric and humanized monoclonal antibodies, comprising both human and non-human portions, can be made using standard recombinant DNA techniques. Such chimeric and humanized monoclonal antibodies can be produced by recombinant DNA techniques known in the art, for example using methods described in Robinson et al International Application No. PCT/US86/02269; Akira, et al European Patent Application 184,187; Taniguchi, M., European Patent Application 171,496; Morrison et al European Patent Application 173,494; Neuberger et al PCT International Publication No. WO 86/01533; Cabilly et al U.S. Pat. No. 4,816,567; Cabilly et al European Patent Application 125,023; Better et al., Science 240: 1041-1043 (1988); Liu et al., Proc. Natl. Acad. Sci. USA 84: 3439-3443 (1987); Liu et al., J. Immunol. 139: 3521-3526 (1987); Sun et al., Proc. Natl. Acad. Sci. USA 84: 214-218 (1987); Nishimura et al., Canc. Res. 47: 999-1005 (1987); Wood et al., Nature 314: 446-449 (1985); and Shaw et al., J. Natl. Cancer Inst. 80: 1553-1559 (1988); Morrison, S. L., Science 229:1202-1207 (1985); Oi et al., BioTechniques 4: 214 (1986); Winter U.S. Pat. No. 5,225,539; Jones et al., Nature 321: 552-525 (1986); Verhoeyan et al., Science 239: 1534; and Beidler et al., J. Immunol. 141: 4053-4060 (1988).

[0172] Completely human antibodies are particularly desirable for therapeutic treatment of human patients. Such antibodies can be produced using transgenic mice that are incapable of expressing endogenous immunoglobulin heavy and light chains genes, but which can express human heavy and light chain genes. See, for example, Lonberg and Huszar, Int. Rev. Immunol. 13: 65-93 (1995); and U.S. Pat. Nos. 5,625,126; 5,633,425; 5,569,825; 5,661,016; and 5,545,806. In addition, companies such as Abgenix, Inc. (Fremont, Calif.) and Medarex, Inc. (Princeton, N.J.), can be engaged to provide human antibodies directed against a selected antigen using technology similar to that described above. Completely human antibodies that recognize a selected epitope also can be generated using a technique referred to as “guided selection.” In this approach a selected non-human monoclonal antibody (e.g., a murine antibody) is used to guide the selection of a completely human antibody recognizing the same epitope. This technology is described for example by Jespers et al., Bio/Technology 12: 899-903 (1994).

[0173] Antibody can be a single chain antibody. A single chain antibody (scFV) can be engineered (see, e.g., Colcher et al., Ann. NY Acad. Sci. 880: 263-80 (1999); and Reiter, Clin. Cancer Res. 2: 245-52 (1996)). Single chain antibodies can be dimerized or multimerized to generate multivalent antibodies having specificities for different epitopes of the same target polypeptide.

[0174] Antibodies also may be selected or modified so that they exhibit reduced or no ability to bind an Fc receptor. For example, an antibody may be an isotype or subtype, fragment or other mutant, which does not support binding to an Fc receptor (e.g., it has a mutagenized or deleted Fc receptor binding region).

[0175] Also, an antibody (or fragment thereof) may be conjugated to a therapeutic moiety such as a cytotoxin, a therapeutic agent or a radioactive metal ion. A cytotoxin or cytotoxic agent includes any agent that is detrimental to cells. Examples include taxol, cytochalasin B, gramicidin D, ethidium bromide, emetine, mitomycin, etoposide, tenoposide, vincristine, vinblastine, colchicin, doxorubicin, daunorubicin, dihydroxy anthracin dione, mitoxantrone, mithramycin, actinomycin D, 1 dehydrotestosterone, glucocorticoids, procaine, tetracaine, lidocaine, propranolol, and puromycin and analogs or homologs thereof. Therapeutic agents include, but are not limited to, antimetabolites (e.g., methotrexate, 6-mercaptopurine, 6-thioguanine, cytarabine, 5-fluorouracil decarbazine), alkylating agents (e.g., mechlorethamine, thiotepa chlorambucil, melphalan, carmustine (BCNU) and lomustine (CCNU), cyclophosphamide, busulfan, dibromomannitol, streptozotocin, mitomycin C, and cis-dichlorodiamine platinum (II) (DDP) cisplatin), anthracyclines (e.g., daunorubicin (formerly daunomycin) and doxorubicin), antibiotics (e.g., dactinomycin (formerly actinomycin), bleomycin, mithramycin, and anthramycin (AMC)), and anti-mitotic agents (e.g., vincristine and vinblastine).

[0176] Antibody conjugates can be used for modifying a given biological response. For example, the drug moiety may be a protein or polypeptide possessing a desired biological activity. Such proteins may include, for example, a toxin such as abrin, ricin A, pseudomonas exotoxin, or diphtheria toxin; a polypeptide such as tumor necrosis factor, γ-interferon, α-interferon, nerve growth factor, platelet derived growth factor, tissue plasminogen activator; or, biological response modifiers such as, for example, lymphokines, interleukin-1 (“IL-1”), interleukin-2 (“IL-2”), interleukin-6 (“IL-6”), granulocyte macrophage colony stimulating factor (“GM-CSF”), granulocyte colony stimulating factor (“G-CSF”), or other growth factors. Also, an antibody can be conjugated to a second antibody to form an antibody heteroconjugate as described by Segal in U.S. Pat. No. 4,676,980, for example.

[0177] An antibody (e.g., monoclonal antibody) can be used to isolate target polypeptides by standard techniques, such as affinity chromatography or immunoprecipitation. Moreover, an antibody can be used to detect a target polypeptide (e.g., in a cellular lysate or cell supernatant) in order to evaluate the abundance and pattern of expression of the polypeptide. Antibodies can be used diagnostically to monitor polypeptide levels in tissue as part of a clinical testing procedure, e.g., to determine the efficacy of a given treatment regimen. Detection can be facilitated by coupling (i.e., physically linking) the antibody to a detectable substance (i.e., antibody labeling). Examples of detectable substances include various enzymes, prosthetic groups, fluorescent materials, luminescent materials, bioluminescent materials, and radioactive materials. Examples of suitable enzymes include horseradish peroxidase, alkaline phosphatase, β-galactosidase, or acetylcholinesterase; examples of suitable prosthetic group complexes include streptavidin/biotin and avidin/biotin; examples of suitable fluorescent materials include umbelliferone, fluorescein, fluorescein isothiocyanate, rhodamine, dichlorotriazinylamine fluorescein, dansyl chloride or phycoerythrin; an example of a luminescent material includes luminol; examples of bioluminescent materials include luciferase, luciferin, and aequorin, and examples of suitable radioactive material include ¹²⁵I, ¹³¹I, ³⁵S or ³H. Also, an antibody can be utilized as a test molecule for determining whether it can treat breast cancer, and as a therapeutic for administration to a subject for treating breast cancer.

[0178] An antibody can be made by immunizing with a purified antigen, or a fragment thereof, e.g., a fragment described herein, a membrane associated antigen, tissues, e.g., crude tissue preparations, whole cells, preferably living cells, lysed cells, or cell fractions.

[0179] Included herein are antibodies which bind only a native polypeptide, only denatured or otherwise non-native polypeptide, or which bind both, as well as those having linear or conformational epitopes. Conformational epitopes sometimes can be identified by selecting antibodies that bind to native but not denatured polypeptide. Also featured are antibodies that specifically bind to a polypeptide variant associated with breast cancer.

[0180] Screening Assays

[0181] Featured herein are methods for identifying a candidate therapeutic for treating breast cancer. The methods comprise contacting a test molecule with a target molecule in a system. A “target molecule” as used herein refers to a nucleic acid of SEQ ID NO: 1-11, a substantially identical nucleic acid thereof, or a fragment thereof, and an encoded polypeptide of the foregoing. The method also comprises determining the presence or absence of an interaction between the test molecule and the target molecule, where the presence of an interaction between the test molecule and the nucleic acid or polypeptide identifies the test molecule as a candidate breast cancer therapeutic. The interaction between the test molecule and the target molecule may be quantified.

[0182] Test molecules and candidate therapeutics include, but are not limited to, compounds, anti sense nucleic acids, siRNA molecules, ribozymes, polypeptides or proteins encoded by a GP6, LAMA4, CHGB, LOC338749 or TTN nucleic acids, or a substantially identical sequence or fragment thereof, and immunotherapeutics (e.g., antibodies and HLA-presented polypeptide fragments). A test molecule or candidate therapeutic may act as a modulator of target molecule concentration or target molecule function in a system. A “modulator” may agonize (i.e., up-regulates) or antagonize (i.e., down-regulates) a target molecule concentration partially or completely in a system by affecting such cellular functions as DNA replication and/or DNA processing (e.g., DNA methylation or DNA repair), RNA transcription and/or RNA processing (e.g., removal of intronic sequences and/or translocation of spliced mRNA from the nucleus), polypeptide production (e.g., translation of the polypeptide from mRNA), and/or polypeptide post-translational modification (e.g., glycosylation, phosphorylation, and proteolysis of pro-polypeptides). A modulator may also agonize or antagonize a biological function of a target molecule partially or completely, where the function may include adopting a certain structural conformation, interacting with one or more binding partners, ligand binding, catalysis (e.g., phosphorylation, dephosphorylation, hydrolysis, methylation, and isomerization), and an effect upon a cellular event (e.g., effecting progression of breast cancer).

[0183] As used herein, the term “system” refers to a cell free in vitro environment and a cell-based environment such as a collection of cells, a tissue, an organ, or an organism. A system is “contacted” with a test molecule in a variety of manners, including adding molecules in solution and allowing them to interact with one another by diffusion, cell injection, and any administration routes in an animal. As used herein, the term “interaction” refers to an effect of a test molecule on test molecule, where the effect sometimes is binding between the test molecule and the target molecule, and sometimes is an observable change in cells, tissue, or organism.

[0184] There are many standard methods for detecting the presence or absence of an interaction between a test molecule and a target molecule. For example, titrametric, acidimetric, radiometric, NMR, monolayer, polarographic, spectrophotometric, fluorescent, and ESR assays probative of a target molecule interaction may be utilized.

[0185] In general, an interaction can be determined by labeling the test molecule and/or the GP6, LAMA4, CHGB, LOC338749 or TTN molecule, where the label is covalently or non-covalently attached to the test molecule or GP6, LAMA4, CHGB, LOC338749 or TTN molecule. The label is sometimes a radioactive molecule such as ¹²⁵I, ¹³¹I, ³⁵S or ³H, which can be detected by direct counting of radioemission or by scintillation counting. Also, enzymatic labels such as horseradish peroxidase, alkaline phosphatase, or luciferase may be utilized where the enzymatic label can be detected by determining conversion of an appropriate substrate to product. Also, presence or absence of an interaction can be determined without labeling. For example, a microphysiometer (e.g., Cytosensor) is an analytical instrument that measures the rate at which a cell acidifies its environment using a light-addressable potentiometric sensor (LAPS). Changes in this acidification rate can be used as an indication of an interaction between a test molecule and GP6, LAMA4, CHGB, LOC338749 or TTN (McConnell, H. M. et al., Science 257: 1906-1912 (1992)).

[0186] In cell-based systems, cells typically include a GP6, LAMA4, CHGB, LOC338749 or TTN nucleic acid or polypeptide or variants thereof and are often of mammalian origin, although the cell can be of any origin. Whole cells, cell homogenates, and cell fractions (e.g., cell membrane fractions) can be subjected to analysis. Where interactions between a test molecule with a GP6, LAMA4, CHGB, LOC338749 or TTN polypeptide or variant thereof are monitored, soluble and/or membrane bound forms of the polypeptide or variant may be utilized. Where membrane-bound forms of the polypeptide are used, it may be desirable to utilize a solubilizing agent. Examples of such solubilizing agents include non-ionic detergents such as n-octylglucoside, n-dodecylglucoside, n-dodecylmaltoside, octanoyl-N-methylglucamide, decanoyl-N-methylglucamide, Triton® X-100, Triton® X-114, Thesit®, Isotridecypoly(ethylene glycol ether)n, 3-[(3-cholamidopropyl)dimethylamminio]-1-propane sulfonate (CHAPS), 3-[(3-cholamidopropyl)dimethylamminio]-2-hydroxy-1-propane sulfonate (CHAPSO), or N-dodecyl-N,N-dimethyl-3-ammonio-1-propane sulfonate.

[0187] An interaction between two molecules also can be detected by monitoring fluorescence energy transfer (FET) (see, for example, Lakowicz et al., U.S. Pat. No. 5,631,169; Stavrianopoulos et al. U.S. Pat. No. 4,868,103). A fluorophore label on a first, “donor” molecule is selected such that its emitted fluorescent energy will be absorbed by a fluorescent label on a second, “acceptor” molecule, which in turn is able to fluoresce due to the absorbed energy. Alternately, the “donor” polypeptide molecule may simply utilize the natural fluorescent energy of tryptophan residues. Labels are chosen that emit different wavelengths of light, such that the “acceptor” molecule label may be differentiated from that of the “donor”. Since the efficiency of energy transfer between the labels is related to the distance separating the molecules, the spatial relationship between the molecules can be assessed. In a situation in which binding occurs between the molecules, the fluorescent emission of the “acceptor” molecule label in the assay should be maximal. An FET binding event can be conveniently measured through standard fluorometric detection means well known in the art (e.g., using a fluorimeter).

[0188] In another embodiment, determining the presence or absence of an interaction between a test molecule and a GP6, LAMA4, CHGB, LOC338749 or TTN molecule can be effected by using real-time Biomolecular Interaction Analysis (BIA) (see, e.g., Sjolander & Urbaniczk, Anal. Chem. 63: 2338-2345 (1991) and Szabo et al., Curr. Opin. Struct. Biol. 5: 699-705 (1995)). “Surface plasmon resonance” or “BIA” detects biospecific interactions in real time, without labeling any of the interactants (e.g., BIAcore). Changes in the mass at the binding surface (indicative of a binding event) result in alterations of the refractive index of light near the surface (the optical phenomenon of surface plasmon resonance (SPR)), resulting in a detectable signal which can be used as an indication of real-time reactions between biological molecules.

[0189] In another embodiment, the GP6, LAMA4, CHGB, LOC338749 or TTN molecule or test molecules are anchored to a solid phase. The GP6, LAMA4, CHGB, LOC338749 or TTN molecule/test molecule complexes anchored to the solid phase can be detected at the end of the reaction. The target GP6, LAMA4, CHGB, LOC338749 or TTN molecule is often anchored to a solid surface, and the test molecule, which is not anchored, can be labeled, either directly or indirectly, with detectable labels discussed herein.

[0190] It may be desirable to immobilize a GP6, LAMA4, CHGB, LOC338749 or TTN molecule, an anti-GP6, LAMA4, CHGB, LOC338749 or TTN antibody, or test molecules to facilitate separation of complexed from uncomplexed forms of GP6, LAMA4, CHGB, LOC338749 or TTN molecules and test molecules, as well as to accommodate automation of the assay. Binding of a test molecule to a GP6, LAMA4, CHGB, LOC338749 or TTN molecule can be accomplished in any vessel suitable for containing the reactants. Examples of such vessels include microtiter plates, test tubes, and micro-centrifuge tubes. In one embodiment, a fusion polypeptide can be provided which adds a domain that allows a GP6, LAMA4, CHGB, LOC338749 or TTN molecule to be bound to a matrix. For example, glutathione-S-transferase/GP6, LAMA4, CHGB, LOC338749 or TTN fusion polypeptides or glutathione-S-transferase/target fusion polypeptides can be adsorbed onto glutathione sepharose beads (Sigma Chemical, St. Louis, Mo.) or glutathione derivitized microtiter plates, which are then combined with the test compound or the test compound and either the non-adsorbed target polypeptide or GP6, LAMA4, CHGB, LOC338749 or TTN polypeptide, and the mixture incubated under conditions conducive to complex formation (e.g., at physiological conditions for salt and pH). Following incubation, the beads or microtiter plate wells are washed to remove any unbound components, the matrix immobilized in the case of beads, complex determined either directly or indirectly, for example, as described above. Alternatively, the complexes can be dissociated from the matrix, and the level of GP6, LAMA4, CHGB, LOC338749 or TTN binding or activity determined using standard techniques.

[0191] Other techniques for immobilizing a GP6, LAMA4, CHGB, LOC338749 or TTN molecule on matrices include using biotin and streptavidin. For example, biotinylated GP6, LAMA4, CHGB, LOC338749 or TTN polypeptide or target molecules can be prepared from biotin-NHS (N-hydroxy-succinimide) using techniques known in the art (e.g., biotinylation kit, Pierce Chemicals, Rockford, Ill.), and immobilized in the wells of streptavidin-coated 96 well plates (Pierce Chemical).

[0192] In order to conduct the assay, the non-immobilized component is added to the coated surface containing the anchored component. After the reaction is complete, unreacted components are removed (e.g., by washing) under conditions such that any complexes formed will remain immobilized on the solid surface. The detection of complexes anchored on the solid surface can be accomplished in a number of ways. Where the previously non-immobilized component is pre-labeled, the detection of label immobilized on the surface indicates that complexes were formed. Where the previously non-immobilized component is not pre-labeled, an indirect label can be used to detect complexes anchored on the surface; e.g., using a labeled antibody specific for the immobilized component (the antibody, in turn, can be directly labeled or indirectly labeled with, e.g., a labeled anti-Ig antibody).

[0193] In one embodiment, this assay is performed utilizing antibodies reactive with GP6, LAMA4, CHGB, LOC338749 or TTN polypeptide or test molecules but which do not interfere with binding of the GP6, LAMA4, CHGB, LOC338749 or TTN polypeptide to its test molecule. Such antibodies can be derivitized to the wells of the plate, and unbound target or GP6, LAMA4, CHGB, LOC338749 or TTN polypeptide trapped in the wells by antibody conjugation. Methods for detecting such complexes, in addition to those described above for the GST-immobilized complexes, include immunodetection of complexes using antibodies reactive with the GP6, LAMA4, CHGB, LOC338749 or TTN polypeptide or target molecule, as well as enzyme-linked assays which rely on detecting an enzymatic activity associated with the GP6, LAMA4, CHGB, LOC338749 or TTN polypeptide or test molecule.

[0194] Alternatively, cell free assays can be conducted in a liquid phase. In such an assay, the reaction products are separated from unreacted components, by any of a number of standard techniques, including but not limited to: differential centrifugation (see, for example, Rivas, G., and Minton, A. P., Trends Biochem Sci August;18(8): 284-7 (1993)); chromatography (gel filtration chromatography, ion-exchange chromatography); electrophoresis (see, e.g., Ausubel et al., eds. Current Protocols in Molecular Biology, J. Wiley: New York (1999)); and immunoprecipitation (see, for example, Ausubel, F. et al., eds. Current Protocols in Molecular Biology, J. Wiley: New York (1999)). Such resins and chromatographic techniques are known to one skilled in the art (see, e.g., Heegaard, J Mol. Recognit. Winter; 11(1-6): 141-8 (1998); Hage & Tweed, J. Chromatogr. B Biomed. Sci. Appl. October 10; 699 (1-2): 499-525 (1997)). Further, fluorescence energy transfer may also be conveniently utilized, as described herein, to detect binding without further purification of the complex from solution.

[0195] In another embodiment, modulators of GP6, LAMA4, CHGB, LOC338749 or TTN expression are identified. For example, a cell or cell free mixture is contacted with a candidate compound and the expression of GP6, LAMA4, CHGB, LOC338749 or TTN mRNA or polypeptide evaluated relative to the level of expression of GP6, LAMA4, CHGB, LOC338749 or TTN mRNA or polypeptide in the absence of the candidate compound. When expression of GP6, LAMA4, CHGB, LOC338749 or TTN mRNA or polypeptide is greater in the presence of the candidate compound than in its absence, the candidate compound is identified as a stimulator of GP6, LAMA4, CHGB, LOC338749 or TTN mRNA or polypeptide expression. Alternatively, when expression of GP6, LAMA4, CHGB, LOC338749 or TTN mRNA or polypeptide is less (statistically significantly less) in the presence of the candidate compound than in its absence, the candidate compound is identified as an inhibitor of GP6, LAMA4, CHGB, LOC338749 or TTN mRNA or polypeptide expression. The level of GP6, LAMA4, CHGB, LOC338749 or TTN mRNA or polypeptide expression can be determined by methods described herein for detecting GP6, LAMA4, CHGB, LOC338749 or TTN mRNA or polypeptide.

[0196] In another embodiment, binding partners that interact with a GP6, LAMA4, CHGB, LOC338749 or TTN molecule are detected. The GP6, LAMA4, CHGB, LOC338749 or TTN molecules can interact with one or more cellular or extracellular macromolecules, such as polypeptides, in vivo, and these molecules that interact with GP6, LAMA4, CHGB, LOC338749 or TTN molecules are referred to herein as “binding partners.” Molecules that disrupt such interactions can be useful in regulating the activity of the target gene product. Such molecules can include, but are not limited to molecules such as antibodies, peptides, and small molecules. Target genes/products for use in this embodiment often are the GP6, LAMA4, CHGB, LOC338749 or TTN genes herein identified. In an alternative embodiment, provided is a method for determining the ability of the test compound to modulate the activity of a GP6, LAMA4, CHGB, LOC338749 or TTN polypeptide through modulation of the activity of a downstream effector of a GP6, LAMA4, CHGB, LOC338749 or TTN target molecule. For example, the activity of the effector molecule on an appropriate target can be determined, or the binding of the effector to an appropriate target can be determined, as previously described.

[0197] To identify compounds that interfere with the interaction between the target gene product and its cellular or extracellular binding partner(s), e.g., a substrate, a reaction mixture containing the target gene product and the binding partner is prepared, under conditions and for a time sufficient, to allow the two products to form complex. In order to test an inhibitory agent, the reaction mixture is provided in the presence and absence of the test compound. The test compound can be initially included in the reaction mixture, or can be added at a time subsequent to the addition of the target gene and its cellular or extracellular binding partner. Control reaction mixtures are incubated without the test compound or with a placebo. The formation of any complexes between the target gene product and the cellular or extracellular binding partner is then detected. The formation of a complex in the control reaction, but not in the reaction mixture containing the test compound, indicates that the compound interferes with the interaction of the target gene product and the interactive binding partner. Additionally, complex formation within reaction mixtures containing the test compound and normal target gene product can also be compared to complex formation within reaction mixtures containing the test compound and mutant target gene product. This comparison can be important in those cases where it is desirable to identify compounds that disrupt interactions of mutant but not normal target gene products.

[0198] These assays can be conducted in a heterogeneous or homogeneous format. Heterogeneous assays involve anchoring either the target gene product or the binding partner onto a solid phase, and detecting complexes anchored on the solid phase at the end of the reaction. In homogeneous assays, the entire reaction is carried out in a liquid phase. In either approach, the order of addition of reactants can be varied to obtain different information about the compounds being tested. For example, test compounds that interfere with the interaction between the target gene products and the binding partners, e.g., by competition, can be identified by conducting the reaction in the presence of the test substance. Alternatively, test compounds that disrupt preformed complexes, e.g., compounds with higher binding constants that displace one of the components from the complex, can be tested by adding the test compound to the reaction mixture after complexes have been formed. The various formats are briefly described below.

[0199] In a heterogeneous assay system, either the target gene product or the interactive cellular or extracellular binding partner, is anchored onto a solid surface (e.g., a microtiter plate), while the non- anchored species is labeled, either directly or indirectly. The anchored species can be immobilized by non-covalent or covalent attachments. Alternatively, an immobilized antibody specific for the species to be anchored can be used to anchor the species to the solid surface.

[0200] In order to conduct the assay, the partner of the immobilized species is exposed to the coated surface with or without the test compound. After the reaction is complete, unreacted components are removed (e.g., by washing) and any complexes formed will remain immobilized on the solid surface. Where the non-immobilized species is pre-labeled, the detection of label immobilized on the surface indicates that complexes were formed. Where the non-immobilized species is not pre-labeled, an indirect label can be used to detect complexes anchored on the surface; e.g., using a labeled antibody specific for the initially non-immobilized species (the antibody, in turn, can be directly labeled or indirectly labeled with, e.g., a labeled anti-Ig antibody). Depending upon the order of addition of reaction components, test compounds that inhibit complex formation or that disrupt preformed complexes can be detected.

[0201] Alternatively, the reaction can be conducted in a liquid phase in the presence or absence of the test compound, the reaction products separated from unreacted components, and complexes detected; e.g., using an immobilized antibody specific for one of the binding components to anchor any complexes formed in solution, and a labeled antibody specific for the other partner to detect anchored complexes. Again, depending upon the order of addition of reactants to the liquid phase, test compounds that inhibit complex or that disrupt preformed complexes can be identified.

[0202] In an alternate embodiment, a homogeneous assay can be used. For example, a preformed complex of the target gene product and the interactive cellular or extracellular binding partner product is prepared in that either the target gene products or their binding partners are labeled, but the signal generated by the label is quenched due to complex formation (see, e.g., U.S. Pat. No. 4,109,496 that utilizes this approach for immunoassays). The addition of a test substance that competes with and displaces one of the species from the preformed complex will result in the generation of a signal above background. In this way, test substances that disrupt target gene product-binding partner interaction can be identified.

[0203] Also, binding partners of GP6, LAMA4, CHGB, LOC338749 or TTN molecules can be identified in a two-hybrid assay or three-hybrid assay (see, e.g., U.S. Pat. No. 5,283,317; Zervos et al., Cell 72:223-232 (1993); Madura et al., J. Biol. Chem. 268: 12046-12054 (1993); Bartel et al., Biotechniques 14: 920-924 (1993); Iwabuchi et al., Oncogene 8: 1693-1696 (1993); and Brent WO94/10300), to identify other polypeptides, which bind to or interact with GP6, LAMA4, CHGB, LOC338749 or TTN(“GP6, LAMA4, CHGB, LOC338749 or TTN-binding polypeptides” or “GP6, LAMA4, CHGB, LOC338749 or TTN-bp”) and are involved in GP6, LAMA4, CHGB, LOC338749 or TTN activity. Such GP6, LAMA4, CHGB, LOC338749 or TTN-bps can be activators or inhibitors of signals by the GP6, LAMA4, CHGB, LOC338749 or TTN polypeptides or GP6, LAMA4, CHGB, LOC338749 or TTN targets as, for example, downstream elements of a GP6, LAMA4, CHGB, LOC338749 or TTN-mediated signaling pathway.

[0204] A two-hybrid system is based on the modular nature of most transcription factors, which consist of separable DNA-binding and activation domains. Briefly, the assay utilizes two different DNA constructs. In one construct, the gene that codes for a GP6, LAMA4, CHGB, LOC338749 or TTN polypeptide is fused to a gene encoding the DNA binding domain of a known transcription factor (e.g., GAL-4). In the other construct, a DNA sequence, from a library of DNA sequences, that encodes an unidentified polypeptide (“prey” or “sample”) is fused to a gene that codes for the activation domain of the known transcription factor. (Alternatively the: GP6, LAMA4, CHGB, LOC338749 or TTN polypeptide can be the fused to the activator domain.) If the “bait” and the “prey” polypeptides are able to interact, in vivo, forming a GP6, LAMA4, CHGB, LOC338749 or TTN-dependent complex, the DNA-binding and activation domains of the transcription factor are brought into close proximity. This proximity allows transcription of a reporter gene (e.g., LacZ) which is operably linked to a transcriptional regulatory site responsive to the transcription factor. Expression of the reporter gene can be detected and cell colonies containing the functional transcription factor can be isolated and used to obtain the cloned gene which encodes the polypeptide which interacts with the GP6, LAMA4, CHGB, LOC338749 or TTN polypeptide.

[0205] Candidate therapeutics for treating breast cancer are identified from a group of test molecules that interact with a GP6, LAMA4, CHGB, LOC338749 or TTN nucleic acid or polypeptide. Test molecules are normally ranked according to the degree with which they interact or modulate (e.g., agonize or antagonize) DNA replication and/or processing, RNA transcription and/or processing, polypeptide production and/or processing, and/or function of GP6, LAMA4, CHGB, LOC338749 or TTN molecules, for example, and then top ranking modulators are selected. In a preferred embodiment, the candidate therapeutic (i.e., test molecule) acts as a GP6, LAMA4, CHGB, LOC338749 or TTN antagonist. Also, pharmacogenomic information described herein can determine the rank of a modulator. Candidate therapeutics typically are formulated for administration to a subject.

[0206] Therapeutic Treatments

[0207] Formulations or pharmaceutical compositions typically include in combination with a pharmaceutically acceptable carrier, a compound, an antisense nucleic acid, a ribozyme, an antibody, a binding partner that interacts with a GP6, LAMA4, CHGB, LOC338749 or TTN polypeptide, a GP6, LAMA4, CHGB, LOC338749 or TTN nucleic acid, or a fragment thereof. The formulated molecule may be one that is identified by a screening method described above. Also, formulations may comprise a GP6, LAMA4, CHGB, LOC338749 or TTN polypeptide or fragment thereof. As used herein, the term “pharmaceutically acceptable carrier” includes solvents, dispersion media, coatings, antibacterial and antifungal agents, isotonic and absorption delaying agents, and the like, compatible with pharmaceutical administration. Supplementary active compounds can also be incorporated into the compositions.

[0208] A pharmaceutical composition is formulated to be compatible with its intended route of administration. Examples of routes of administration include parenteral, e.g., intravenous, intradermal, subcutaneous, oral (e.g., inhalation), transdermal (topical), transmucosal, and rectal administration. Solutions or suspensions used for parenteral, intradermal, or subcutaneous application can include the following components: a sterile diluent such as water for injection, saline solution, fixed oils, polyethylene glycols, glycerin, propylene glycol or other synthetic solvents; antibacterial agents such as benzyl alcohol or methyl parabens; antioxidants such as ascorbic acid or sodium bisulfite; chelating agents such as ethylenediaminetetraacetic acid; buffers such as acetates, citrates or phosphates and agents for the adjustment of tonicity such as sodium chloride or dextrose. pH can be adjusted with acids or bases, such as hydrochloric acid or sodium hydroxide. The parenteral preparation can be enclosed in ampoules, disposable syringes or multiple dose vials made of glass or plastic.

[0209] Oral compositions generally include an inert diluent or an edible carrier. For the purpose of oral therapeutic administration, the active compound can be incorporated with excipients and used in the form of tablets, troches, or capsules, e.g., gelatin capsules. Oral compositions can also be prepared using a fluid carrier for use as a mouthwash. Pharmaceutically compatible binding agents, and/or adjuvant materials can be included as part of the composition. The tablets, pills, capsules, troches and the like can contain any of the following ingredients, or compounds of a similar nature: a binder such as microcrystalline cellulose, gum tragacanth or gelatin; an excipient such as starch or lactose, a disintegrating agent such as alginic acid, Primogel, or corn starch; a lubricant such as magnesium stearate or Sterotes; a glidant such as colloidal silicon dioxide; a sweetening agent such as sucrose or saccharin; or a flavoring agent such as peppermint, methyl salicylate, or orange flavoring.

[0210] Pharmaceutical compositions suitable for injectable use include sterile aqueous solutions (where water soluble) or dispersions and sterile powders for the extemporaneous preparation of sterile injectable solutions or dispersion. For intravenous administration, suitable carriers include physiological saline, bacteriostatic water, Cremophor EL™ (BASF, Parsippany, N.J.) or phosphate buffered saline (PBS). In all cases, the composition must be sterile and should be fluid to the extent that easy syringability exists. It should be stable under the conditions of manufacture and storage and must be preserved against the contaminating action of microorganisms such as bacteria and fungi. The carrier can be a solvent or dispersion medium containing, for example, water, ethanol, polyol (for example, glycerol, propylene glycol, and liquid polyethylene glycol, and the like), and suitable mixtures thereof. The proper fluidity can be maintained, for example, by the use of a coating such as lecithin, by the maintenance of the required particle size in the case of dispersion and by the use of surfactants. Prevention of the action of microorganisms can be achieved by various antibacterial and antifungal agents, for example, parabens, chlorobutanol, phenol, ascorbic acid, thimerosal, and the like. In many cases, isotonic agents, for example, sugars, polyalcohols such as mannitol, sorbitol, sodium chloride sometimes are included in the composition. Prolonged absorption of the injectable compositions can be brought about by including in the composition an agent which delays absorption, for example, aluminum monostearate and gelatin.

[0211] Sterile injectable solutions can be prepared by incorporating the active compound in the required amount in an appropriate solvent with one or a combination of ingredients enumerated above, as required, followed by filtered sterilization. Generally, dispersions are prepared by incorporating the active compound into a sterile vehicle which contains a basic dispersion medium and the required other ingredients from those enumerated above. In the case of sterile powders for the preparation of sterile injectable solutions, methods of preparation often utilized are vacuum drying and freeze-drying which yields a powder of the active ingredient plus any additional desired ingredient from a previously sterile-filtered solution thereof.

[0212] For administration by inhalation, the compounds are delivered in the form of an aerosol spray from pressured container or dispenser which contains a suitable propellant, e.g., a gas such as carbon dioxide, or a nebulizer.

[0213] Systemic administration can also be by transmucosal or transdermal means. For transmucosal or transdermal administration, penetrants appropriate to the barrier to be permeated are used in the formulation. Such penetrants are generally known in the art, and include, for example, for transmucosal administration, detergents, bile salts, and fusidic acid derivatives. Transmucosal administration can be accomplished through the use of nasal sprays or suppositories. For transdermal administration, the active compounds are formulated into ointments, salves, gels, or creams as generally known in the art. Molecules can also be prepared in the form of suppositories (e.g., with conventional suppository bases such as cocoa butter and other glycerides) or retention enemas for rectal delivery.

[0214] In one embodiment, active molecules are prepared with carriers that will protect the compound against rapid elimination from the body, such as a controlled release formulation, including implants and microencapsulated delivery systems. Biodegradable, biocompatible polymers can be used, such as ethylene vinyl acetate, polyanhydrides, polyglycolic acid, collagen, polyorthoesters, and polylactic acid. Methods for preparation of such formulations will be apparent to those skilled in the art. Materials can also be obtained commercially from Alza Corporation and Nova Pharmaceuticals, Inc. Liposomal suspensions (including liposomes targeted to infected cells with monoclonal antibodies to viral antigens) can also be used as pharmaceutically acceptable carriers. These can be prepared according to methods known to those skilled in the art, for example, as described in U.S. Pat. No. 4,522,811.

[0215] It is advantageous to formulate oral or parenteral compositions in dosage unit form for ease of administration and uniformity of dosage. Dosage unit form as used herein refers to physically discrete units suited as unitary dosages for the subject to be treated; each unit containing a predetermined quantity of active compound calculated to produce the desired therapeutic effect in association with the required pharmaceutical carrier.

[0216] Toxicity and therapeutic efficacy of such compounds can be determined by standard pharmaceutical procedures in cell cultures or experimental animals, e.g., for determining the LD₅₀ (the dose lethal to 50% of the population) and the ED₅₀ (the dose therapeutically effective in 50% of the population). The dose ratio between toxic and therapeutic effects is the therapeutic index and it can be expressed as the ratio LD₅₀/D₅₀. Molecules which exhibit high therapeutic indices often are utilized. While molecules that exhibit toxic side effects may be used, care should be taken to design a delivery system that targets such compounds to the site of affected tissue in order to minimize potential damage to uninfected cells and, thereby, reduce side effects.

[0217] The data obtained from the cell culture assays and animal studies can be used in formulating a range of dosage for use in humans. The dosage of such molecules often lies within a range of circulating concentrations that include the ED₅₀ with little or no toxicity. The dosage may vary within this range depending upon the dosage form employed and the route of administration utilized. For any molecules used in the methods described herein, the therapeutically effective dose can be estimated initially from cell culture assays. A dose may be formulated in animal models to achieve a circulating plasma concentration range that includes the IC₅₀ (i.e., the concentration of the test compound which achieves a half-maximal inhibition of symptoms) as determined in cell culture. Such information can be used to more accurately determine useful doses in humans. Levels in plasma may be measured, for example, by high performance liquid chromatography.

[0218] As defined herein, a therapeutically effective amount of protein or polypeptide (i.e., an effective dosage) ranges from about 0.001 to 30 mg/kg body weight, sometimes about 0.01 to 25 mg/kg body weight, often about 0. I to 20 mg/kg body weight, and more often about 1 to 10 mg/kg, 2 to 9 mg/kg, 3 to 8 mg/kg, 4 to 7 mg/kg, or 5 to 6 mg/kg body weight. The protein or polypeptide can be administered one time per week for between about 1 to 10 weeks, sometimes between 2 to 8 weeks, often between about 3 to 7 weeks, and more often for about 4, 5, or 6 weeks. The skilled artisan will appreciate that certain factors may influence the dosage and timing required to effectively treat a subject, including but not limited to the severity of the disease or disorder, previous treatments, the general health and/or age of the subject, and other diseases present. Moreover, treatment of a subject with a therapeutically effective amount of a protein, polypeptide, or antibody can include a single treatment, or sometimes can include a series of treatments.

[0219] With regard to polypeptide formulations, featured herein is a method for treating breast cancer in a subject, which comprises contacting one or more cells in the subject with a first GP6, LAMA4, CHGB, LOC338749 or TTN polypeptide, where the subject comprises a second GP6, LAMA4, CHGB, LOC338749 or TTN polypeptide having one or more polymorphic variations associated with cancer, and where the first polypeptide comprises fewer polymorphic variations associated with cancer than the second polypeptide. The first and second polypeptides are encoded by a nucleic acid which comprises a nucleotide sequence selected from the group consisting of the nucleotide sequence of SEQ ID NO: 1-11; a nucleotide sequence which encodes a polypeptide consisting of an amino acid sequence encoded by a nucleotide sequence of SEQ ID NO: 1-11; a nucleotide sequence which encodes a polypeptide that is 90% or more identical to an amino acid sequence encoded by a nucleotide sequence of SEQ ID NO: 1-11 and a nucleotide sequence 90% or more identical to a nucleotide sequence of SEQ ID NO: 1-11. The subject is often a human.

[0220] For antibodies, a dosage of 0.1 mg/kg of body weight (generally 10 mg/kg to 20 mg/kg) is often utilized. If the antibody is to act in the brain, a dosage of 50 mg/kg to 100 mg/kg is often appropriate. Generally, partially human antibodies and fully human antibodies have a longer half-life within the human body than other antibodies. Accordingly, lower dosages and less frequent administration is often possible. Modifications such as lipidation can be used to stabilize antibodies and to enhance uptake and tissue penetration (e.g., into the brain). A method for lipidation of antibodies is described by Cruikshank et al., J. Acquired Immune Deficiency Syndromes and Human Retrovirology 14:193 (1997).

[0221] Antibody conjugates can be used for modifying a given biological response, the drug moiety is not to be construed as limited to classical chemical therapeutic agents. For example, the drug moiety may be a protein or polypeptide possessing a desired biological activity. Such proteins may include, for example, a toxin such as abrin, ricin A, pseudomonas exotoxin, or diphtheria toxin; a polypeptide such as tumor necrosis factor, .alpha.-interferon, .beta.-interferon, nerve growth factor, platelet derived growth factor, tissue plasminogen activator; or, biological response modifiers such as, for example, lymphokines, interleukin-1 (“IL-1”), interleukin-2 (“IL-2”), interleukin-6 (“IL-6”), granulocyte macrophage colony stimulating factor (“GM-CSF”), granulocyte colony stimulating factor (“G-CSF”), or other growth factors. Alternatively, an antibody can be conjugated to a second antibody to form an antibody heteroconjugate as described by Segal in U.S. Pat. No. 4,676,980.

[0222] For compounds, exemplary doses include milligram or microgram amounts of the compound per kilogram of subject or sample weight, for example, about 1 microgram per kilogram to about 500 milligrams per kilogram, about 100 micrograms per kilogram to about 5 milligrams per kilogram, or about 1 microgram per kilogram to about 50 micrograms per kilogram. It is understood that appropriate doses of a small molecule depend upon the potency of the small molecule with respect to the expression or activity to be modulated. When one or more of these small molecules is to be administered to an animal (e.g., a human) in order to modulate expression or activity of a polypeptide or nucleic acid described herein, a physician, veterinarian, or researcher may, for example, prescribe a relatively low dose at first, subsequently increasing the dose until an appropriate response is obtained. In addition, it is understood that the specific dose level for any particular animal subject will depend upon a variety of factors including the activity of the specific compound employed, the age, body weight, general health, gender, and diet of the subject, the time of administration, the route of administration, the rate of excretion, any drug combination, and the degree of expression or activity to be modulated.

[0223] GP6, LAMA4, CHGB, LOC338749 or TTN nucleic acid molecules can be inserted into vectors and used in gene therapy methods for treating breast cancer. Featured herein is a method for treating breast cancer in a subject, which comprises contacting one or more cells in the subject with a first GP6, LAMA4, CHGB, LOC338749 or TTN nucleic acid, where genomic DNA in the subject comprises a second GP6, LAMA4, CHGB, LOC338749 or TTN nucleic acid comprising one or more polymorphic variations associated with breast cancer, and where the first GP6, LAMA4, CHGB, LOC338749 or TTN nucleic acid comprises fewer polymorphic variations associated with breast cancer. The first and second nucleic acids typically comprise a nucleotide sequence selected from the group consisting of the nucleotide sequence of SEQ ID NO: 1-11; a nucleotide sequence which encodes a polypeptide consisting of an amino acid sequence encoded by a nucleotide sequence of SEQ ID NO: 1-11; a nucleotide sequence that is 90% or more identical to the nucleotide sequence of SEQ ID NO: 1-11, and a nucleotide sequence which encodes a polypeptide that is 90% or more identical to an amino acid sequence encoded by a nucleotide sequence of SEQ ID NO: 1-11. The subject often is a human.

[0224] Gene therapy vectors can be delivered to a subject by, for example, intravenous injection, local administration (see U.S. Pat. No. 5,328,470) or by stereotactic injection (see e.g., Chen et al., (1994) Proc. Natl. Acad. Sci. USA 91:3054-3057). Pharmaceutical preparations of gene therapy vectors can include a gene therapy vector in an acceptable diluent, or can comprise a slow release matrix in which the gene delivery vehicle is imbedded. Alternatively, where the complete gene delivery vector can be produced intact from recombinant cells (e.g., retroviral vectors) the pharmaceutical preparation can include one or more cells which produce the gene delivery system. Examples of gene delivery vectors are described herein.

[0225] Pharmaceutical compositions can be included in a container, pack, or dispenser together with instructions for administration.

[0226] Pharmaceutical compositions of active ingredients can be administered by any of the paths described herein for therapeutic and prophylactic methods for treating breast cancer. With regard to both prophylactic and therapeutic methods of treatment, such treatments may be specifically tailored or modified, based on knowledge obtained from pharmacogenomic analyses described herein. As used herein, the term “treatment” is defined as the application or administration of a therapeutic agent to a patient, or application or administration of a therapeutic agent to an isolated tissue or cell line from a patient, who has a disease, a symptom of disease or a predisposition toward a disease, with the purpose to cure, heal, alleviate, relieve, alter, remedy, ameliorate, improve or affect the disease, the symptoms of disease or the predisposition toward disease. A therapeutic agent includes, but is not limited to, small molecules, peptides, antibodies, ribozymes and antisense oligonucleotides.

[0227] Administration of a prophylactic agent can occur prior to the manifestation of symptoms characteristic of the GP6, LAMA4, CHGB, LOC338749 or TTN aberrance, such that a disease or disorder is prevented or, alternatively, delayed in its progression. Depending on the type of GP6, LAMA4, CHGB, LOC338749 or TTN aberrance, for example, a GP6, LAMA4, CHGB, LOC338749 or TTN molecule, GP6, LAMA4, CHGB, LOC338749 or TTN agonist, or GP6, LAMA4, CHGB, LOC338749 or TTN antagonist agent can be used for treating the subject. The appropriate agent can be determined based on screening assays described herein.

[0228] As discussed, successful treatment of GP6, LAMA4, CHGB, LOC338749 or TTN disorders can be brought about by techniques that serve to inhibit the expression or activity of target gene products. For example, compounds (e.g., an agent identified using an assays described above) that exhibit negative modulatory activity can be used to prevent and/or treat breast cancer. Such molecules can include, but are not limited to peptides, phosphopeptides, small organic or inorganic molecules, or antibodies (including, for example, polyclonal, monoclonal, humanized, anti-idiotypic, chimeric or single chain antibodies, and FAb, F(ab′)2 and FAb expression library fragments, scFV molecules, and epitope- binding fragments thereof).

[0229] Further, antisense and ribozyme molecules that inhibit expression of the target gene can also be used to reduce the level of target gene expression, thus effectively reducing the level of target gene activity. Still further, triple helix molecules can be utilized in reducing the level of target gene activity. Antisense, ribozyme and triple helix molecules are discussed above.

[0230] It is possible that the use of antisense, ribozyme, and/or triple helix molecules to reduce or inhibit mutant gene expression can also reduce or inhibit the transcription (triple helix) and/or translation (antisense, ribozyme) of mRNA produced by normal target gene alleles, such that the concentration of normal target gene product present can be lower than is necessary for a normal phenotype. In such cases, nucleic acid molecules that encode and express target gene polypeptides exhibiting normal target gene activity can be introduced into cells via gene therapy method. Alternatively, in instances where the target gene encodes an extracellular polypeptide, normal target gene polypeptide often is co-administered into the cell or tissue to maintain the requisite level of cellular or tissue target gene activity.

[0231] Another method by which nucleic acid molecules may be utilized in treating or preventing a disease characterized by GP6, LAMA4, CHGB, LOC338749 or TTN expression is through the use of aptamer molecules specific for GP6, LAMA4, CHGB, LOC338749 or TTN polypeptide. Aptamers are nucleic acid molecules having a tertiary structure which permits them to specifically bind to polypeptide ligands (see, e.g., Osborne, et al., Curr. Opin. Chem. Biol. 1(1): 5-9 (1997); and Patel, D. J., Curr. Opin. Chem. Biol. June;l(l): 32-46 (1997)). Since nucleic acid molecules may in many cases be more conveniently introduced into target cells than therapeutic polypeptide molecules may be, aptamers offer a method by which GP6, LAMA4A, CHGB, LOC338749 or TTN polypeptide activity may be specifically decreased without the introduction of drugs or other molecules which may have pluripotent effects.

[0232] Antibodies can be generated that are both specific for target gene product and that reduce target gene product activity. Such antibodies may, therefore, by administered in instances whereby negative modulatory techniques are appropriate for the treatment of GP6, LAMA4, CHGB, LOC338749 or TTN disorders. For a description of antibodies, see the Antibody section above.

[0233] In circumstances where injection of an animal or a human subject with a GP6, LAMA4, CHGB, LOC338749 or TTN polypeptide or epitope for stimulating antibody production is harmful to the subject, it is possible to generate an immune response against GP6, LAMA4, CHGB, LOC338749 or TTN through the use of anti-idiotypic antibodies (see, for example, Herlyn, D., Ann. Med.;31(1): 66-78 (1999); and Bhattacharya-Chatterjee & Foon, Cancer Treat. Res.; 94: 51-68 (1998)). If an anti-idiotypic antibody is introduced into a mammal or human subject, it should stimulate the production of anti-anti-idiotypic antibodies, which should be specific to the GP6, LAMA4, CHGB, LOC338749 or TTN polypeptide. Vaccines directed to a disease characterized by GP6, LAMA4, CHGB, LOC338749 or TTN expression may also be generated in this fashion.

[0234] In instances where the target antigen is intracellular and whole antibodies are used, internalizing antibodies may be utilized. Lipofectin or liposomes can be used to deliver the antibody or a fragment of the Fab region that binds to the target antigen into cells. Where fragments of the antibody are used, the smallest inhibitory fragment that binds to the target antigen often is utilized. For example, peptides having an amino acid sequence corresponding to the Fv region of the antibody can be used. Alternatively, single chain neutralizing antibodies that bind to intracellular target antigens can also be administered. Such single chain antibodies can be administered, for example, by expressing nucleotide sequences encoding single-chain antibodies within the target cell population (see e.g., Marasco et al., Proc. Natl. Acad. Sci. USA 90: 7889-7893 (1993)).

[0235] GP6, LAMA4, CHGB, LOC338749 or TTN molecules and compounds that inhibit target gene expression, synthesis and/or activity can be administered to a patient at therapeutically effective doses to prevent, treat or ameliorate GP6, LAMA4, CHGB, LOC338749 or TTN disorders. A therapeutically effective dose refers to that amount of the compound sufficient to result in amelioration of symptoms of the disorders.

[0236] Toxicity and therapeutic efficacy of such compounds can be determined by standard pharmaceutical procedures in cell cultures or experimental animals, e.g., for determining the LD₅₀ (the dose lethal to 50% of the population) and the ED₅₀ (the dose therapeutically effective in 50% of the population). The dose ratio between toxic and therapeutic effects is the therapeutic index and it can be expressed as the ratio LD₅₀/ED₅₀. Compounds that exhibit large therapeutic indices often are utilized. While compounds that exhibit toxic side effects can be used, care should be taken to design a delivery system that targets such compounds to the site of affected tissue in order to minimize potential damage to uninfected cells and, thereby, reduce side effects.

[0237] Data obtained from cell culture assays and animal studies can be used in formulating a range of dosage for use in humans. The dosage of such compounds often lies within a range of circulating concentrations that include the ED₅₀ with little or no toxicity. The dosage can vary within this range depending upon the dosage form employed and the route of administration utilized. For any compound used in a method described herein, the therapeutically effective dose can be estimated initially from cell culture assays. A dose can be formulated in animal models to achieve a circulating plasma concentration range that includes the IC₅₀ (i.e., the concentration of the test compound that achieves a half-maximal inhibition of symptoms) as determined in cell culture. Such information can be used to more accurately determine useful doses in humans. Levels in plasma can be measured, for example, by high performance liquid chromatography.

[0238] Another example of effective dose determination for an individual is the ability to directly assay levels of “free” and “bound” compound in the serum of the test subject. Such assays may utilize antibody mimics and/or “biosensors” that have been created through molecular imprinting techniques. The compound which is able to modulate GP6, LAMA4, CHGB, LOC338749 or TTN activity is used as a template, or “imprinting molecule”, to spatially organize polymerizable monomers prior to their polymerization with catalytic reagents. The subsequent removal of the imprinted molecule leaves a polymer matrix which contains a repeated “negative image” of the compound and is able to selectively rebind the molecule under biological assay conditions. A detailed review of this technique can be seen in Ansell et al., Current Opinion in Biotechnology 7: 89-94 (1996) and in Shea, Trends in Polymer Science 2: 166-173 (1994). Such “imprinted” affinity matrixes are amenable to ligand-binding assays, whereby the immobilized monoclonal antibody component is replaced by an appropriately imprinted matrix. An example of the use of such matrixes in this way can be seen in Vlatakis, et al., Nature 361: 645-647 (1993). Through the use of isotope-labeling, the “free” concentration of compound which modulates the expression or activity of GP6, LAMAS4, CHGB, LOC338749 or TTN can be readily monitored and used in calculations of IC₅₀. Such “imprinted” affinity matrixes can also be designed to include fluorescent groups whose photon-emitting properties measurably change upon local and selective binding of target compound. These changes can be readily assayed in real time using appropriate fiberoptic devices, in turn allowing the dose in a test subject to be quickly optimized based on its individual IC₅₀. A rudimentary example of such a “biosensor” is discussed in Kriz et al., Analytical Chemistry 67: 2142-2144 (1995).

[0239] Provided herein are methods of modulating GP6, LAMA4, CHGB, LOC338749 or TTN expression or activity for therapeutic purposes. Accordingly, in an exemplary embodiment, the modulatory method involves contacting a cell with a GP6, LAMA4, CHGB, LOC338749 or TTN or agent that modulates one or more of the activities of GP6, LAMA4, CHGB, LOC338749 or TTN polypeptide activity associated with the cell. An agent that modulates GP6, LAMA4, CHGB, LOC338749 or TTN polypeptide activity can be an agent as described herein, such as a nucleic acid or a polypeptide, a naturally-occurring target molecule of a GP6, LAMA4, CHGB, LOC338749 or TTN polypeptide (e.g., a GP6, LAMA4, CHGB, LOC338749 or TTN substrate or receptor), a GP6, LAMA4, CHGB, LOC338749 or TTN antibody, a GP6, LAMA4, CHGB, LOC338749 or TTN agonist or antagonist, a peptidomimetic of a GP6, LAMA4, CHGB, LOC338749 or TTN agonist or antagonist, or other small molecule.

[0240] In one embodiment, the agent stimulates one or more GP6, LAMA4, CHGB, LOC338749 or TTN activities. Examples of such stimulatory agents include active GP6, LAMA4, CHGB, LOC338749 or TTN polypeptide and a nucleic acid molecule encoding GP6, LAMA4, CHGB, LOC338749 or TTN. In another embodiment, the agent inhibits one or more GP6, LAMA4, CHGB, LOC338749 or TTN activities. Examples of such inhibitory agents include antisense GP6, LAMA4, CHGB, LOC338749 or TTN nucleic acid molecules, anti-GP6, LAMA4, CHGB, LOC338749 or TTN antibodies, and GP6, LAMA4, CHGB, LOC338749 or TTN inhibitors. These modulatory methods can be performed in vitro (e.g., by culturing the cell with the agent) or, alternatively, in vivo (e.g., by administering the agent to a subject). As such, provided are methods of treating an individual afflicted with a disease or disorder characterized by aberrant or unwanted expression or activity of a GP6, LAMA4, CHGB, LOC338749 or TTN polypeptide or nucleic acid molecule. In one embodiment, the method involves administering an agent (e.g., an agent identified by a screening assay described herein), or combination of agents that modulates (e.g., upregulates or downregulates) GP6, LAMA4, CHGB, LOC338749 or TTN expression or activity. In a preferred embodiment, the method involves administering an agent (e.g., an agent identified by a screening assay described herein), or combination of agents that inhibits GP6, LAMA4, CHGB, LOC338749 or TTN expression or activity. In another embodiment, the method involves administering a GP6, LAMA4, CHGB, LOC338749 or TTN polypeptide or nucleic acid molecule as therapy to compensate for reduced, aberrant, or unwanted GP6, LAMA4, CHGB, LOC338749 or TTN expression or activity.

[0241] Stimulation of GP6, LAMA4, CHGB, LOC338749 or TTN activity is desirable in situations in which GP6, LAMA4, CHGB, LOC338749 or TTN is abnormally downregulated and/or in which increased GP6, LAMA4, CHGB, LOC338749 or TTN activity is likely to have a beneficial effect. For example, stimulation of GP6, LAMA4, CHGB, LOC338749 or TTN activity is desirable in situations in which a GP6, LAMA4, CHGB, LOC338749 or TTN is downregulated and/or in which increased GP6, LAMA4, CHGB, LOC338749 or TTN activity is likely to have a beneficial effect. Likewise, inhibition of GP6, LAMA4, CHGB, LOC338749 or TTN activity is desirable in situations in which GP6, LAMA4, CHGB, LOC338749 or TTN is abnormally upregulated and/or in which decreased GP6, LAMA4, CHGB, LOC338749 or TTN activity is likely to have a beneficial effect.

[0242] Methods of Treatment

[0243] In another aspect, provided are methods for identifying a risk of cancer in an individual as described herein and, if a genetic predisposition is identified, treating that individual to delay or reduce or prevent the development of cancer. Such a procedure can be used to treat breast cancer. Optionally, treating an individual for cancer may include inhibiting cellular proliferation, inhibiting metastasis, inhibiting invasion, or preventing tumor formation or growth as defined herein. Suitable treatments to prevent or reduce or delay breast cancer focus on inhibiting additional cellular proliferation, inhibiting metastasis, inhibiting invasion, and preventing further tumor formation or growth. Treatment usually includes surgery followed by radiation therapy. Surgery may be a lumpectomy or a mastectomy (e.g., total, simple or radical). Even if the doctor removes all of the cancer that can be seen at the time of surgery, the patient may be given radiation therapy, chemotherapy, or hormone therapy after surgery to try to kill any cancer cells that may be left. Radiation therapy is the use of x-rays or other types of radiation to kill cancer cells and shrink tumors. Radiation therapy may use external radiation (using a machine outside the body) or internal radiation. Chemotherapy is the use of drugs to kill cancer cells. Chemotherapy may be taken by mouth, or it may be put into the body by inserting a needle into a vein or muscle. Hormone therapy often focuses on estrogen and progesterone, which are hormones that affect the way some cancers grow. If tests show that the cancer cells have estrogen and progesterone receptors (molecules found in some cancer cells to which estrogen and progesterone will attach), hormone therapy is used to block the way these hormones help the cancer grow. Hormone therapy with tamoxifen is often given to patients with early stages of breast cancer and those with metastatic breast cancer. Other types of treatment being tested in clinical trials include sentinel lymph node biopsy followed by surgery and high-dose chemotherapy with bone marrow transplantation and peripheral blood stem cell transplantation. Any preventative/therapeutic treatment known in the art may be prescribed and/or administered, including, for example, surgery, chemotherapy and/or radiation treatment, and any of the treatments may be used in combination with one another to treat or prevent breast cancer (e.g., surgery followed by radiation therapy).

[0244] Also provided are methods of preventing or treating cancer comprising providing an individual in need of such treatment with a GP6, LAMA4, CHGB, LOC338749 or TTN inhibitor that reduces or inhibits the overexpression of mutant GP6, LAMA4, CHGB, LOC338749 or TTN (e.g., a GP6, LAMA4, CHGB, LOC338749 or TTN polynucleotide with an allele that is associated with cancer). Included herein are methods of reducing or blocking the expression of GP6, LAMA4, CHGB, LOC338749 or TTN comprising providing or administering to individuals in need of reducing or blocking the expression of GP6, LAMA4, CHGB, LOC338749 or TTN a pharmaceutical or physiologically acceptable composition comprising a molecule capable of inhibiting expression of GP6, LAMA4, CHGB, LOC338749 or TTN, e.g., a siRNA molecule. Also included herein are methods of reducing or blocking the expression of secondary regulatory genes regulated by GP6, LAMA4, CHGB, LOC338749 or TTN that play a role in oncogenesis which comprises introducing competitive inhibitors that target GP6, LAMA4, CHGB, LOC338749 or TTN's effect on these regulatory genes or that block the binding of positive factors necessary for the expression of these regulatory genes.

[0245] The examples set forth below are intended to illustrate but not limit the invention.

### EXAMPLES

[0246] In the following studies a group of subjects were selected according to specific parameters relating to breast cancer. Nucleic acid samples obtained from individuals in the study group were subjected to genetic analysis, which identified associations between breast cancer and certain polymorphic regions in the GP6, LAMA4, CHGB/C20orf154, LOC338749 and TTN/LOC351327 genes or gene regions (herein referred to as “target genes”, “target nucleotides”, “target polypeptides” or simply “targets”). Methods are described for producing GP6, LAMA4, CHGB/C20orf154, LOC338749, or TTN/LOC351327 polypeptides and polypeptide variants in vitro or in vivo. GP6, LAMA4, CHGB/C20orf154, LOC338749 or TTN/LOC351327 nucleic acids or polypeptides and variants thereof are utilized for screening test molecules for those that interact with GP6, LAMA4, CHGB/C20Orf154, LOC338749 or TTN/LOC351327 molecules. Test molecules identified as interactors with GP6, LAMA4, CHGB/C20orf154, LOC338749 or TTN/LOC351327 molecules and variants are further screened in vivo to determine whether they treat breast cancer.

### Example 1

### Samples and Pooling Strategies

Sample Selection

[0247] Blood samples were collected from individuals diagnosed with breast cancer, which were referred to as case samples. Also, blood samples were collected from individuals not diagnosed with breast cancer as gender and age-matched controls. All of the samples were of German/German descent. A database was created that listed all phenotypic trait information gathered from individuals for each case and control sample. Genomic DNA was extracted from each of the blood samples for genetic analyses.

[0248] DNA Extraction from Blood Samples

[0249] Six to ten milliliters of whole blood was transferred to a 50 ml tube containing 27 ml of red cell lysis solution (RCL). The tube was inverted until the contents were mixed. Each tube was incubated for 10 minutes at room temperature and inverted once during the incubation. The tubes were then centrifuged for 20 minutes at 3000×g and the supernatant was carefully poured off. 100-200 μl of residual liquid was left in the tube and was pipetted repeatedly to resuspend the pellet in the residual supernatant. White cell lysis solution (WCL) was added to the tube and pipetted repeatedly until completely mixed. While no incubation was normally required, the solution was incubated at 37° C. or room temperature if cell clumps were visible after mixing until the solution was homogeneous. 2 ml of protein precipitation was added to the cell lysate. The mixtures were vortexed vigorously at high speed for 20 sec to mix the protein precipitation solution uniformly with the cell lysate, and then centrifuged for 10 minutes at 3000×g. The supernatant containing the DNA was then poured into a clean 15 ml tube, which contained 7 ml of 100% isopropanol. The samples were mixed by inverting the tubes gently until white threads of DNA were visible. Samples were centrifuged for 3 minutes at 2000×g and the DNA was visible as a small white pellet. The supernatant was decanted and 5 ml of 70% ethanol was added to each tube. Each tube was inverted several times to wash the DNA pellet, and then centrifuged for 1 minute at 2000×g. The ethanol was decanted and each tube was drained on clean absorbent paper. The DNA was dried in the tube by inversion for 10 minutes, and then 1000 μl of 1× TE was added. The size of each sample was estimated, and less TE buffer was added during the following DNA hydration step if the sample was smaller. The DNA was allowed to rehydrate overnight at room temperature, and DNA samples were stored at 2-8° C.

[0250] DNA was quantified by placing samples on a hematology mixer for at least 1 hour. DNA was serially diluted (typically 1:80, 1:160, 1:320, and 1:640 dilutions) so that it would be within the measurable range of standards. 125 μl of diluted DNA was transferred to a clear U-bottom microtitre plate, and 125 μl of 1× TE buffer was transferred into each well using a multichannel pipette. The DNA and 1× TE were mixed by repeated pipetting at least 15 times, and then the plates were sealed. 50 μl of diluted DNA was added to wells A5-H12 of a black flat bottom microtitre plate. Standards were inverted six times to mix them, and then 50 μl of 1× TE buffer was pipetted into well A1, 1000 ng/ml of standard was pipetted into well A2, 500 ng/ml of standard was pipetted into well A3, and 250 ng/ml of standard was pipetted into well A4. PicoGreen (Molecular Probes, Eugene, Oreg.) was thawed and freshly diluted 1:200 according to the number of plates that were being measured. PicoGreen was vortexed and then 501 was pipetted into all wells of the black plate with the diluted DNA. DNA and PicoGreen were mixed by pipetting repeatedly at least 10 times with the multichannel pipette. The plate was placed into a Fluoroskan Ascent Machine (microplate fluorometer produced by Labsystems) and the samples were allowed to incubate for 3 minutes before the machine was run using filter pairs 485 nm excitation and 538 nm emission wavelengths. Samples having measured DNA concentrations of greater than 450 ng/μl were re-measured for conformation. Samples having measured DNA concentrations of 20 ng/μl or less were re-measured for confirmation.

[0251] Pooling Strategies

[0252] Samples were placed into one of two groups based on disease status. The two groups were female case groups and female control groups. A select set of samples from each group were utilized to generate pools, and one pool was created for each group. Each individual sample in a pool was represented by an equal amount of genomic DNA. For example, where 25 ng of genomic DNA was utilized in each PCR reaction and there were 200 individuals in each pool, each individual would provide 125 pg of genomic DNA. Inclusion or exclusion of samples for a pool was based upon the following criteria: the sample was derived from an individual characterized as Caucasian; the sample was derived from an individual of German paternal and maternal descent; the database included relevant phenotype information for the individual; case samples were derived from individuals diagnosed with breast cancer; control samples were derived from individuals free of cancer and no family history of breast cancer; and sufficient genomic DNA was extracted from each blood sample for all allelotyping and genotyping reactions performed during the study. Phenotype information included pre- or post-menopausal, familial predisposition, country or origin of mother and father, diagnosis with breast cancer (date of primary diagnosis, age of individual as of primary diagnosis, grade or stage of development, occurrence of metastases, e.g., lymph node metastases, organ metastases), condition of body tissue (skin tissue, breast tissue, ovary tissue, peritoneum tissue and myometrium), method of treatment (surgery, chemotherapy, hormone therapy, radiation therapy). Samples that met these criteria were added to appropriate pools based on gender and disease status.

[0253] The selection process yielded the pools set forth in Table 1, which were used in the studies that follow:

TABLE 1

| | Female CASE | Female CONTROL |
|---|---|---|
| Pool size | 272 | 276 |
| (Number) | | |
| Pool Criteria | case | control |
| (ex: case/control) | | |
| Mean Age | 59.6 | 55.4 |
| (ex: years) | | |

### Example 2

### Association of Polymorphic Variants with Breast Cancer

[0254] A whole-genome screen was performed to identify particular SNPs associated with occurrence of breast cancer. As described in Example 1, two sets of samples were utilized, which included samples from female individuals having breast cancer (breast cancer cases) and samples from female individuals not having cancer (female controls). The initial screen of each pool was performed in an allelotyping study, in which certain samples in each group were pooled. By pooling DNA from each group, an allele frequency for each SNP in each group was calculated. These allele frequencies were then compared to one another. Particular SNPs were considered as being associated with breast cancer when allele frequency differences calculated between case and control pools were statistically significant. SNP disease association results obtained from the allelotyping study were then validated by genotyping each associated SNP across all samples from each pool. The results of the genotyping were then analyzed, allele frequencies for each group were calculated from the individual genotyping results, and a p-value was calculated to determine whether the case and control groups had statistically significantly differences in allele frequencies for a particular SNP. When the genotyping results agreed with the original allelotyping results, the SNP disease association was considered validated at the genetic level.

[0255] SNP Panel Used for Genetic Analyses

[0256] A whole-genome SNP screen began with an initial screen of approximately 25,000 SNPs over each set of disease and control samples using a pooling approach. The pools studied in the screen are described in Example 1. The SNPs analyzed in this study were part of a set of 25,488 SNPs confirmed as being statistically polymorphic as each is characterized as having a minor allele frequency of greater than 10%. The SNPs in the set reside in genes or in close proximity to genes, and many reside in gene exons. Specifically, SNPs in the set are located in exons, introns, and within 5,000 base-pairs upstream of a transcription start site of a gene. In addition, SNPs were selected according to the following criteria: they are located in ESTs; they are located in Locuslink or Ensemble genes; and they are located in Genomatix promoter predictions. SNPs in the set also were selected on the basis of even spacing across the genome, as depicted in Table 2.

[0257] A case-control study design using a whole genome association strategy involving approximately 28,000 single nucleotide polymorphisms (SNPs) was employed. Approximately 25,000 SNPs were evenly spaced in gene-based regions of the human genome with a median inter-marker distance of about 40,000 base pairs. Additionally, approximately 3,000 SNPs causing amino acid substitutions in genes described in the literature as candidates for various diseases were used. The case-control study samples were of female German origin (German paternal and maternal descent) 548 individuals were equally distributed in two groups (female controls and female cases). The whole genome association approach was first conducted on 2 DNA pools representing the 2 groups. Significant markers were confirmed by individual genotyping.

TABLE 2

| General Statistics | | Spacing Statistics | |
|---|---|---|---|
| Total # of SNPs | 25,488 | Median | 37,058 bp |
| # of Exonic SNPs | >4,335 (17%) | Minimum* | 1,000 bp |
| # SNPs with refSNP ID | 20,776 (81%) | Maximum* | 3,000,000 bp |
| Gene Coverage | >10,000 | Mean | 122,412 bp |
| Chromosome Coverage | All | Std | 373,325 bp |
| | | Deviation | |

*Excludes outliers

Allelotyping and Genotyping Results

[0258] The genetic studies summarized above and described in more detail below identified allelic variants associated with breast cancer. The allelic variants identified from the SNP panel described in Table 2 are summarized below in Table 3.

TABLE 3

| SNP | Chromosome | Position in | Contig | Contig | Sequence | Sequence | Allelic |
|---|---|---|---|---|---|---|---|
| Reference | Position | FIGS. 1-4 | Identification | Position | Identification | Position | Variability |
| rs1671152 | 60202366 | 45666 | NT_011109 | 27794535 | NM_016363 | exonic | T/G |
| | | | | | | (T323K) | |
| rs1050348 | 112494002 | 47502 | NT_025741 | 16663301 | NM_002290 | exonic | C/T |
| | | | | | | (H491Y) | |
| rs454422 | 5891693 | 49293 | NT_011387 | 5883693 | NM_032485 | intragenic | A/C |
| rs763471 | 10491273 | 49273 | NT_009237 | 1853223 | | | G/T |
| rs2046778 | 179636570 | 49170 | NT_005403 | 29831884 | X90569 | upstream | A/G |

[0259] Table 3 includes information pertaining to the incident polymorphic variant associated with breast cancer identified herein. Public information pertaining to the polymorphism and the genomic sequence that includes the polymorphism are indicated. The genomic sequences identified in Table 3 ay be accessed at the http address www.ncbi.nih.gov/entrez/query.fcgi, for example, by using the publicly available SNP reference number. The chromosome position refers to the position of the SNP within NCBI's Genome Build 33, which may be accessed at the following http address: www.ncbi.nlm.nih.gov/mapview/map_search.cgi?chr=hum_chr.inf&query=. The “Contig Position” provided in Table 3 corresponds to a nucleotide position set forth in the contig sequence, and designates the polymorphic site corresponding to the SNP reference number. The sequence containing the polymorphisms also may be referenced by the “Sequence Identification” set forth in Table 3. The “Sequence Identification” corresponds to cDNA sequence that encodes associated target polypeptides of the invention. The position of the SNP within the cDNA sequence is provided in the “Sequence Position” column of Table 3. Also, the allelic variation at the polymorphic site and the allelic variant identified as associated with breast cancer is specified in Table 3. All nucleotide sequences referenced and accessed by the parameters set forth in Table 3 are incorporated herein by reference.

[0260] Assay for Verifying, Allelotyping and Genotyping SNPs

[0261] A MassARRAY™ system (Sequenom, Inc.) was utilized to perform SNP genotyping in a high-throughput fashion. This genotyping platform was complemented by a homogeneous, single-tube assay method (hME™ or homogeneous MassEXTEND™ (Sequenom, Inc.)) in which two genotyping primers anneal to and amplify a genomic target surrounding a polymorphic site of interest. A third primer (the MassEXTEND™ primer), which is complementary to the amplified target up to but not including the polymorphism, was then enzymatically extended one or a few bases through the polymorphic site and then terminated.

[0262] For each polymorphism, SpectroDESIGNER™ software (Sequenom, Inc.) was used to generate a set of PCR primers and a MassEXTEND™ primer was used to genotype the polymorphism. Table 4 shows PCR primers and Table 5 shows extension primers used for analyzing polymorphisms. The initial PCR amplification reaction was performed in a 5 μl total volume containing 1× PCR buffer with 1.5 mM MgCl₂ (Qiagen), 200 μM each of dATP, dGTP, dCTP, dTTP (Gibco-BRL), 2.5 ng of genomic DNA, 0.1 units of HotStar DNA polymerase (Qiagen), and 200 nM each of forward and reverse PCR primers specific for the polymorphic region of interest.

TABLE 4

PCR Primers

| Reference | Forward | Reverse |
|---|---|---|
| SNP ID | PCR primer | PCR primer |
| rs1671152 | ACGTTGGATGAGGGCTGTGCAGAGGCCGCTT | ACGTTGGATGTGAACATCCTGTCGGCCTCC |
| rs1050348 | CAGCTGGATGACTACAATGC | GTTCATGTCTTCGGCATCC |
| rs454422 | CAGCTTTTGAGGCACTTTCC | AGCACCTTGCATACCCATAG |
| rs763471 | TAACTCCTGTGTGGCTTTCT | GTGAAGAGCTCTGAAATGCC |
| rs2046778 | CATGAAGCCTTATGCTTGAG | GTTCCCTTCCCCCATAAAAC |

[0263] Samples were incubated at 95° C. for 15 minutes, followed by 45 cycles of 95° C. for 20 seconds, 56° C. for 30 seconds, and 72° C. for 1 minute, finishing with a 3 minute final extension at 72° C. Following amplification, shrimp alkaline phosphatase (SAP) (0.3 units in a 2 μl volume) (Amersham Pharmacia) was added to each reaction (total reaction volume was 7 μl) to remove any residual dNTPs that were not consumed in the PCR step. Samples were incubated for 20 minutes at 37° C., followed by 5 minutes at 85° C. to denature the SAP.

[0264] Once the SAP reaction was complete, a primer extension reaction was initiated by adding a polymorphism-specific MassEXTEND™ primer cocktail to each sample. Each MassEXTEND™ cocktail included a specific combination of dideoxynucleotides (ddNTPs) and deoxynucleotides (dNTPs) used to distinguish polymorphic alleles from one another. In Table 5, ddNTPs are shown and the fourth nucleotide not shown is the dNTP.

TABLE 5

Extend Primers

| Reference | Extend | Term |
|---|---|---|
| SNP ID | Probe | Mix |
| rs1671152 | CTCCATCCTGACCCCGT | ACT |
| rs1050348 | CACTTGACCAGGCCCTTAAC | ACG |
| rs454422 | GATCCTTCTCACTTACTGTTC | ACT |
| rs763471 | CTCCAAGCAGTAAAGATGTTC | CGT |
| rs2046778 | CTGTCATGATTGACAGGTCC | ACT |

[0265] The MassEXTEND™ reaction was performed in a total volume of 9 μl, with the addition of 1× ThermoSequenase buffer, 0.576 units of ThermoSequenase (Amersham Pharmacia), 600 nM MassEXTEND™ primer, 2 mM of ddATP and/or ddCTP and/or ddGTP and/or ddTTP, and 2 mM of dATP or dCTP or dGTP or dTTP. The deoxy nucleotide (dNTP) used in the assay normally was complementary to the nucleotide at the polymorphic site in the amplicon. Samples were incubated at 94° C. for 2 minutes, followed by 55 cycles of 5 seconds at 94° C., 5 seconds at 52° C., and 5 seconds at 72° C.

[0266] Following incubation, samples were desalted by adding 16 μl of water (total reaction volume was 25 μl), 3 mg of SpectroCLEAN™ sample cleaning beads (Sequenom, Inc.) and allowed to incubate for 3 minutes with rotation. Samples were then robotically dispensed using a piezoelectric dispensing device (SpectroJET™ (Sequenom, Inc.)) onto either 96-spot or 384-spot silicon chips containing a matrix that crystallized each sample (SpectroCHIP® (Sequenom, Inc.)). Subsequently, MALDI-TOF mass spectrometry (Biflex and Autoflex MALDI-TOF mass spectrometers (Bruker Daltonics) can be used) and SpectroTYPER RT™ software (Sequenom, Inc.) were used to analyze and interpret the SNP genotype for each sample.

[0267] Genetic Analysis

[0268] Variations identified in the target genes are provided in their respective genomic sequences (see FIGS. 1-5) Minor allelic frequencies for these polymorphisms was verified as being 10% or greater by determining the allelic frequencies using the extension assay described above in a group of samples isolated from 92 individuals originating from the state of Utah in the United States, Venezuela and France (Coriell cell repositories).

[0269] Genotyping results are shown for female pools in Table 6A and 6B. Table 6A shows the orginal genotyping results and Table 6B shows the genotyped results re-analyzed to remove duplicate individuals from the cases and controls (i.e., individuals who were erroneously included more than once as either cases or controls). Therefore, Table 6B represents a more accurate measure of the allele frequencies for this particular SNP. In the subsequent tables, “AF” refers to allelic frequency; and “F case” and “F control” refer to female case and female control groups, respectively.

TABLE 6A

| | | | | Breast |
|---|---|---|---|---|
| Reference | AF | AF | | Cancer |
| SNP ID | F case | F control | p-value | Assoc. Allele |
| rs1671152 | T = 0.139 | T = 0.192 | 0.0196 | G |
| | G = 0.861 | G = 0.808 | | |
| rs1050348 | C = 0.625 | C = 0.540 | 0.0050 | C |
| | T = 0.375 | T = 0.460 | | |
| rs454422 | C = 0.831 | C = 0.761 | 0.0049 | C |
| | A = 0.169 | A = 0.239 | | |
| rs763471 | T = 0.523 | T = 0.593 | 0.0079 | G |
| | G = 0.477 | G = 0.407 | | |
| rs2046778 | A = 0.836 | A = 0.736 | 0.0019 | A |
| | G = 0.164 | G = 0.264 | | |

[0270] TABLE 6B

| | | | | | Breast |
|---|---|---|---|---|---|
| | | | | | Cancer |
| Reference | AF | AF | | | Assoc. |
| SNP ID | F case | F control | p-value | Odds Ratio | Allele |
| rs1671152 | T = 0.143 | T = 0.190 | 0.00109 | 0.65 | G |
| | G = 0.857 | G = 0.810 | | | (T323K) |
| rs1050348 | C = 0.629 | C = 0.543 | 0.0124 | 0.72 | C |
| | T = 0.371 | T = 0.457 | | | (H491Y) |
| rs454422 | C = 0.834 | C = 0.762 | 0.00452 | 1.57 | C |
| | A = 0.166 | A = 0.238 | | | |
| rs763471 | T = 0.520 | T = 0.596 | 0.0166 | 0.74 | G |
| | G = 0.480 | G = 0.404 | | | |
| rs2046778 | A = 0.811 | A = 0.724 | 0.00114 | 0.61 | A |
| | G = 0.189 | G = 0.276 | | | |

[0271] The single marker alleles set forth in Table 3 were considered validated, since the genotyping data for the females, males or both pools were significantly associated with breast cancer, and because the genotyping results agreed with the original allelotyping results. Particularly significant associations with breast cancer are indicated by a calculated p-value of less than 0.05 for genotype results, which are set forth in bold text. Tables 6A and 6B show the disease associated allele in column 6. In the case of rs1671152, this SNP is an exonic SNP that codes for a T323K amino acid change in the GP6 gene. The guanine allele codes for threonine (T); therefore, a threonine is associated with an increased risk of breast cancer. In the case of rs454422, this SNP is an exonic SNP that codes for a H491Y amino acid change in the LAMA4 gene. The cytosine allele codes for histidine (H); therefore, a histidine is associated with an increased risk of breast cancer.

[0272] Odds ratio results are shown in Tables 6B. An odds ratio is an unbiased estimate of relative risk which can be obtained from most case-control studies. Relative risk (RR) is an estimate of the likelihood of disease in the exposed group (susceptibility allele or genotype carriers) compared to the unexposed group (not carriers). It can be calculated by the following equation:
RR=IA/Ia

[0273] IA is the incidence of disease in the A carriers and Ia is the incidence of disease in the non-carriers.

[0274] RR>1 indicates the A allele increases disease susceptibility.

[0275] RR<1 indicates the a allele increases disease susceptibility.

[0276] For example, RR=1.5 indicates that carriers of the A allele have 1.5 times the risk of disease than non-carriers, i.e., 50% more likely to get the disease.

[0277] Case-control studies do not allow the direct estimation of IA and Ia, therefore relative risk cannot be directly estimated. However, the odds ratio (OR) can be calculated using the following equation:
OR=(nDAnda)/(ndAnDa)=pDA(1−pdA)/pdA(1−pDA), or
OR=((case f)/(1−case f))/((control f)/(1−control f)), where f=susceptibility allele frequency.

[0278] An odds ratio can be interpreted in the same way a relative risk is interpreted and can be directly estimated using the data from case-control studies, i.e., case and control allele frequencies. The higher the odds ratio value, the larger the effect that particular allele has on the development of breast cancer. Possessing an allele associated with a relatively high odds ratio translates to having a higher risk of developing or having breast cancer.

### Example 3

### GP6 Region Proximal SNPs

[0279] It has been discovered that a polymorphic variation (rs1671152) in a region that encodes the glycoprotein VI (platelet)(GP6) gene is associated with the occurrence of breast cancer (see Examples 1 and 2). Subsequently, SNPs proximal to the incident SNP (rs1671152) were identified and allelotyped in breast cancer sample sets and control sample sets as described in Examples 1 and 2. Approximately 124 allelic variants located within or near the GP6 gene were identified and 114 SNPs were allelotyped. The polymorphic variants are set forth in Table 7. The chromosome position provided in column four of Table 7 is based on Genome “Build 33” of NCBI's GenBank.

TABLE 7

| dbSNP | | Position in | Chromosome | Allele |
|---|---|---|---|---|
| rs# | Chromosome | | Position | Variants |
| 269911 | 19 | 185 | 60156885 | A/T |
| 703464 | 19 | 237 | 60156937 | G/A |
| 703465 | 19 | 641 | 60157341 | C/G |
| 269912 | 19 | 719 | 60157419 | A/G |
| 269913 | 19 | 990 | 60157690 | T/C |
| 269915 | 19 | 2908 | 60159608 | C/T |
| 269916 | 19 | 3140 | 60159840 | G/A |
| 172006 | 19 | 3880 | 60160580 | A/G |
| 703467 | 19 | 4494 | 60161194 | C/T |
| 703468 | 19 | 5107 | 60161807 | G/A |
| 2217659 | 19 | 5220 | 60161920 | G/A |
| 775894 | 19 | 6031 | 60162731 | A/G |
| 775900 | 19 | 8670 | 60165370 | A/G |
| 1654491 | 19 | 13794 | 60170494 | T/C |
| 775903 | 19 | 16356 | 60173056 | A/G |
| 1036231 | 19 | 17164 | 60173864 | T/C |
| 1036232 | 19 | 17264 | 60173964 | G/A |
| 1671223 | 19 | 20537 | 60177237 | T/G |
| 1671224 | 19 | 20637 | 60177337 | A/G |
| 1654495 | 19 | 20900 | 60177600 | C/A |
| 1654496 | 19 | 21155 | 60177855 | C/A |
| 1654497 | 19 | 21795 | 60178495 | T/C |
| 1671225 | 19 | 21931 | 60178631 | T/G |
| 1671226 | 19 | 22167 | 60178867 | C/G |
| 1671227 | 19 | 22656 | 60179356 | T/C |
| 1654498 | 19 | 23108 | 60179808 | T/C |
| 1671228 | 19 | 23404 | 60180104 | T/C |
| 1654499 | 19 | 24287 | 60180987 | T/C |
| 1869616 | 19 | 24480 | 60181180 | A/C |
| 1654503 | 19 | 24592 | 60181292 | C/T |
| 1654504 | 19 | 24878 | 60181578 | T/C |
| 1671133 | 19 | 26370 | 60183070 | A/C |
| 1654505 | 19 | 27056 | 60183756 | G/A |
| 3786863 | 19 | 27874 | 60184574 | A/G |
| 1560714 | 19 | 31248 | 60187948 | G/A |
| 1654406 | 19 | 31458 | 60188158 | G/T |
| 1043673 | 19 | 31553 | 60188253 | C/A |
| 1043678 | 19 | 31637 | 60188337 | G/T |
| 1043680 | 19 | 31668 | 60188368 | C/G |
| 1043684 | 19 | 31752 | 60188452 | A/G |
| 1671140 | 19 | 37643 | 60194343 | G/A |
| 1654409 | 19 | 43941 | 60200641 | A/C |
| 1654410 | 19 | 44134 | 60200834 | T/C |
| 1654411 | 19 | 44329 | 60201029 | A/C |
| 1671148 | 19 | 44343 | 60201043 | A/C |
| 1671149 | 19 | 44362 | 60201062 | G/A |
| 1671150 | 19 | 44818 | 60201518 | G/A |
| 1654412 | 19 | 44917 | 60201617 | C/T |
| 1671151 | 19 | 45215 | 60201915 | G/A |
| 1671152 | 19 | 45666 | 60202366 | T/G |
| 1654413 | 19 | 45680 | 60202380 | T/A |
| 2304167 | 19 | 46402 | 60203102 | C/T |
| 1671153 | 19 | 46510 | 60203210 | G/T |
| 2019599 | 19 | 46554 | 60203254 | C/T |
| 1654485 | 19 | 46823 | 60203523 | A/C |
| 1671188 | 19 | 47714 | 60204414 | T/G |
| 1671191 | 19 | 48963 | 60205663 | T/C |
| 1654415 | 19 | 49157 | 60205857 | C/T |
| 1671192 | 19 | 49254 | 60205954 | G/A |
| 2304168 | 19 | 49257 | 60205957 | A/G |
| 1654416 | 19 | 49356 | 60206056 | T/C |
| 1654419 | 19 | 55202 | 60211902 | A/G |
| 1654420 | 19 | 55527 | 60212227 | T/A |
| 1613662 | 19 | 55916 | 60212616 | G/A |
| 2886415 | 19 | 56402 | 60213102 | T/G |
| 2365593 | 19 | 56413 | 60213113 | C/T |
| 2886414 | 19 | 56685 | 60213385 | G/A |
| 1654421 | 19 | 56783 | 60213483 | A/G |
| 1654424 | 19 | 58044 | 60214744 | A/G |
| 1654425 | 19 | 58301 | 60215001 | T/C |
| 892089 | 19 | 58382 | 60215082 | A/G |
| 892090 | 19 | 58393 | 60215093 | G/T |
| 1671196 | 19 | 58869 | 60215569 | C/T |
| 1671198 | 19 | 59155 | 60215855 | T/C |
| 1671199 | 19 | 59189 | 60215889 | G/A |
| 1625609 | 19 | 62546 | 60219246 | C/T |
| 1625689 | 19 | 62568 | 60219268 | G/A |
| 1654438 | 19 | 70983 | 60227683 | A/G |
| 2569513 | 19 | 71465 | 60228165 | G/A |
| 2569514 | 19 | 71538 | 60228238 | G/A |
| 1671214 | 19 | 72144 | 60228844 | G/A |
| 1671215 | 19 | 72340 | 60229040 | C/A |
| 1054796 | 19 | 72527 | 60229227 | C/G |
| 1654439 | 19 | 72968 | 60229668 | T/G |
| 1671216 | 19 | 73397 | 60230097 | A/G |
| 1671217 | 19 | 73553 | 60230253 | G/A |
| 1671218 | 19 | 73720 | 60230420 | C/T |
| 1654441 | 19 | 74190 | 60230890 | C/T |
| 1654442 | 19 | 74687 | 60231387 | T/G |
| 1671219 | 19 | 74699 | 60231399 | G/A |
| 10666 | 19 | 75580 | 60232280 | C/T |
| 1626971 | 19 | 76345 | 60233045 | T/C |
| 1671221 | 19 | 76506 | 60233206 | G/A |
| 754235 | 19 | 77554 | 60234254 | G/A |
| 775821 | 19 | 77889 | 60234589 | C/T |
| 3745912 | 19 | 77919 | 60234619 | A/G |
| 775822 | 19 | 78866 | 60235566 | A/G |
| 1059211 | 19 | 79061 | 60235761 | C/T |
| 2124090 | 19 | 83777 | 60240477 | A/C |
| 1671171 | 19 | 84360 | 60241060 | T/G |
| 1671170 | 19 | 84631 | 60241331 | T/A |
| 1654444 | 19 | 85775 | 60242475 | G/T |
| 2365721 | 19 | 87153 | 60243853 | G/A |
| 1654446 | 19 | 89650 | 60246350 | A/G |
| 1654447 | 19 | 89895 | 60246595 | A/G |
| 1671176 | 19 | 90103 | 60246803 | C/A |
| 1654448 | 19 | 90234 | 60246934 | G/A |
| 1671178 | 19 | 90309 | 60247009 | G/A |
| 1654449 | 19 | 90376 | 60247076 | G/A |
| 1671182 | 19 | 90925 | 60247625 | C/T |
| 1654451 | 19 | 91561 | 60248261 | A/T |
| 1654452 | 19 | 91605 | 60248305 | G/A |
| 1671169 | 19 | 92954 | 60249654 | T/C |
| 1654459 | 19 | 94228 | 60250928 | A/G |

| | | | |
|---|---|---|---|
| 269909 | 19 | Not Mapped | G/C |
| 269910 | 19 | Not Mapped | T/G |
| 776251 | 19 | Not Mapped | G/A |
| 892088 | 19 | Not Mapped | A/G |
| 892091 | 19 | Not Mapped | C/G |
| 1043680 | 19 | Not Mapped | C/G |
| 1064675 | 19 | Not Mapped | A/G |
| 1671187 | 19 | Not Mapped | T/A |
| 2116883 | 19 | Not Mapped | T/C |
| 2163833 | 19 | Not Mapped | G/A |

Assay for Verifying and Allelotyping SNPs

[0280] The methods used to verify and allelotype the proximal SNPs of Table 7 are the same methods described in Examples 1 and 2 herein. The PCR primers and extend primers used in these assays are provided in Table 8 and Table 9, respectively.

TABLE 8

| | | |
|---|---|---|
| dbSNP | Forward | Reverse |
| rs# | PCR primer | PCR primer |

| | | |
|---|---|---|
| 10666 | ACGTTGGATGAGATGGCCCCTCTCCCCT | ACGTTGGATGAGTGGACTGGCCTGCAGGT |
| 172006 | ACGTTGGATGGGTTGAGGAGTATTTCCATTG | ACGTTGGATGTGGGTGACAGCAAGACTCCA |
| 269909 | AACGTTGGATGAGTTTCTTGTCTCCTGGGTG | ACGTTGGATGCACAACAATGAAAGGACAAGC |
| 269910 | ACGTTGGATGGGCTGCTCAGGTTCTAAAAG | ACGTTGGATGCCCCAGTTCCTTATCTGATC |
| 269911 | ACGTTGGATGGGTGACAAAGTGAGACTCCG | ACGTTGGATGTGACTAGCTGGGATTATGGG |
| 269912 | ACGTTGGATGAGGAGAGCCTGCAGGTTGAA | ACGTTGGATGTCCCTTGATTGTCATCACAG |
| 269913 | ACGTTGGATGAGATGCACCGAATGGATCTG | ACGTTGGATGTCCTAGGACACAGTGTGGAC |
| 269915 | ACGTTGGATGAAGCTGAGATTGTGCTGCTG | ACGTTGGATGACTACTCTACTTTCTACCCC |
| 269916 | ACGTTGGATGAACTCCTGACCACGTGATCC | ACGTTGGATGAAAGTGTAGCTGGGCATGGC |
| 703464 | ACGTTGGATGAAAAGTAGCTGAGCGTGGTG | ACGTTGGATGCCCAGGTTCAAACAGTTCTC |
| 703465 | ACGTTGGATGGCTGTGATGACAATCkAGGG | ACGTTGGATGAGCAGGAACTGGCATTTGAG |
| 703467 | ACGTTGGATGAAACTTACGAAGGTCTGGGC | ACGTTGGATGGGGTTTCAGGAACATTCACC |
| 703468 | ACGTTGGATGGAAAGGAACAAGTGATCCAG | ACGTTGGATGCTTCTGAAAAAGGAGAAGGG |
| 754235 | ACGTTGGATGGTGGAACAAACAGTTGGAGC | ACGTTGGATGGAGTGGAGATCATGCCATTG |
| 775821 | ACGTTGGATGTTTTCTCATCCGCCAGCAGG | ACGTTGGATGACAGAGCACAGGTCCCTTTC |
| 775822 | ACGTTGGATGAAAAGTAGAGCATGTGGACC | ACGTTGGATGGGGATGAACAGACAATCCTC |
| 775894 | ACGTTGGATGAGGCAGGAGGACTGATTGAG | ACGTTGGATGTTGTAGAGACAGGGTCTTGC |
| 775900 | ACGTTGGATGTCTGCAACGTTCGTTCTTCC | ACGTTGGATGTTCTTAATGTGCCCACTGTC |
| 775903 | ACGTTGGATGTGTGCCCGGCCCTTTTTTTC | ACGTTGGATGGGACTCCAGTCTGAGTGACA |
| 776251 | ACGTTGGATGAATCCTAGCTACTCAGGAGG | ACGTTGGATGATGGTATGATCTAGGCTCCC |
| 892088 | ACGTTGGATGATTGGTTACACTGGGACTGC | ACGTTGGATGAAGCGGTGATTCTCAGCCTC |
| 892089 | ACGTTGGATGCCCTACAAGAATCCCGAGAG | ACGTTGGATGAAGCTGTAGCATCGGTAGGTT |
| 892090 | ACGTTGGATGAAGCTGTAGCATCGGTAGGTT | ACGTTGGATGCCCTACAAGAATCCCGAGAG |
| 892091 | ACGTTGGATGAAGATGGAGGACCACAGGTG | ACGTTGGATGACCGGAATTACTGAGAGGTC |
| 1036231 | ACGTTGGATGAACAGTACTAAGGGCAGATG | ACGTTGGATGGTCCAGGGTGTTTACTGTTC |
| 1036232 | ACGTTGGATGCCAAAGAAACTCCCAGAATC | ACGTTGGATGGATCGTGCCATTGCACTTTG |
| 1043673 | ACGTTGGATGTGAAGTCATGAGAAGPAGGC | ACGTTGGATGGCTGCTGGAAGAAATAGAAG |
| 1043678 | ACGTTGGATGTTCATGATCTGAATCCCCCC | ACGTTGGATGGAACTCATTATCCCTGAGGG |
| 1043680 | ACGTTGGATGTCTAGCCCAGCAATGAACTC | ACGTTGGATGTTCCAGGTGTTGGTGAACTG |
| 1043684 | ACGTTGGATGCTCAATATACCCGTGATACAG | ACGTTGGATGTTTAGCCATGATTCTGCCTC |
| 1054796 | ACGTTGGATGAGTGTCACCCTGATTTCCAG | ACGTTGGATGCACCTTGGGAAATACGTTGC |
| 1059211 | ACGTTGGATGCTCAGCTCCTTGGTGAAGAG | ACGTTGGATGGGCAGACGAGGAAGTATAAC |
| 1064675 | ACGTTGGATGGAGTTCCCTCAGTTTTTATTG | ACGTTGGATGCCTACTACATTCCTTTTTTGC |
| 1560714 | ACGTTGGATGATCTGCTGACCTCGTGATCC | ACGTTGGATGAAAAGACAGTCTCAGGTGGG |
| 1613662 | ACGTTGGATGATGGACCCTGCAGAACCTAC | ACGTTGGATGTCTGATTTCCCAGGAACCTC |
| 1625609 | ACGTTGGATGTCAAGCGATTCTCCTGCCTC | ACGTTGGATGAAAAAATGAGCTGGGCGTGG |
| 1625689 | ACGTTGGATGGTAATCCCAGCTACTTGGAG | ACGTTGGATGATCTTGGCTCACTGCAGCCT |
| 1626971 | ACGTTGGATGTATTAAATGCACCTGGCACC | ACGTTGGATGCAAAGTGCTGGGATTACAGG |
| 1654406 | ACGTTGGATGCTTCTATTTCTTCCAGCAGC | ACGTTGGATGTTTCTTCCCCCATTGTACCC |
| 1654409 | ACGTTGGATGGTGAAACCTTGTCTCATATAC | ACGTTGGATGTGAGAGTAGGCATGTGGTAC |
| 1654410 | ACGTTGGATGACTGTGCCTAGGCTATACTG | ACGTTGGATGGGAAAATCATACTGAGATGC |
| 1654411 | ACGTTGGATGTGGAACTTCTTGGTGCCATC | ACGTTGGATGCCTGTAATCCCGGCACTTTG |
| 1654412 | ACGTTGGATGATTAGCCAGGTGTGGTGGTG | ACGTTGGATGTCAAGCCATTCTCCCACCTC |
| 1654413 | ACGTTGGATGAGGGCTGTGCAGAGGCCGCTT | ACGTTGGATGTCCATCCTGACCCCCGTTTG |
| 1654415 | ACGTTGGATGCCAAGAAAGTCCTTGGTGTG | ACGTTGGATGCTTTGAAATGGCCCCATCAC |
| 1654416 | ACGTTGGATGTCTGCTGAGCATGAAATGCC | ACGTTGGATGCTGAACTGACCGTCTCATTC |
| 1654419 | ACGTTGGATGTATCATACGCTAGGCTGGAG | ACGTTGGATGATGTTTCTCCTGCCTTGGTG |
| 1654420 | ACGTTGGATGCCAACCAACCAACAAACCTG | ACGTTTGGATGTGGAAGTTTGAGAACCGCTG |
| 1654421 | ACGTTGGATGAGGACACAGGAATCCAGAAG | ACGTTGGATGGCACATTCTGGGCTATTAAC |
| 1654424 | ACGTTGGATGTAGGTGGGAAGGAAGTGGGA | ACGTTGGATGCCACTTCTTTCCCACCTATG |
| 1654425 | ACGTTGGATGTACCTGTGACCACAAGCTCC | ACGTTGGATGTGCTACAGCTTCTCCAGCAG |
| 1654438 | ACGTTGGATGAATCAACTAGGCATGGTGGC | ACGTTGGATGCCAGGTTCAAGCGATTCTCC |
| 1654439 | ACGTTGGATGCCCCATATACATGTGCGATG | ACGTTGGATGAATGGGGTGTTTTCTGGAGCA |
| 1654441 | ACGTTGGATGAGTAGCTGGGATTACAGGCG | ACGTTGGATGGGAGTTCAAGATAAGCCTGG |
| 1654442 | ACGTTGGATGAGGAGAATGGTGTGAAGCTG | ACGTTGGATGAATCTTGCTCTGTCACCCAG |
| 1654444 | ACGTTGGATGGGATGGTCCCAGTTTTACAT | ACGTTGGATGCCAGGAGAATCACTTTTATGG |
| 1654446 | ACGTTGGATGAAAAGGAAGGGCATTCTGGC | ACGTTGGATGTTTGGCCTCCCAAAGTACTG |
| 1654447 | ACGTTGGATGATCCCTGGGAAGACGGTCAT | ACGTTGGATGTTACCTCTCCTGGCCAGTTC |
| 1654448 | ACGTTGGATGTGCTCACTGCATGAGATTCC | ACGTTGGATGAACTTTGGCCTCCCAAAGTG |
| 1654449 | ACGTTGGATGAGTCCAGCCTGGCAAACATG | ACGTTGGATGCAGTCTAATCTCTCTTTTCCC |
| 1654451 | ACGTTGGATGTTTAAPATGCCCGCTGCACG | ACGTTGGATGAGGAGGATGCACTTATGTGG |
| 1654452 | ACGTTTGGATGCTGTACGCATTACCACAGAC | ACGTTGGATGGTTTTGGACTCTTGACCTGC |
| 1654459 | ACGTTGGATGCAGGAGCTTGGGTACCCAC | ACGTTGGATGCCCTCATCTGGAAATGTGTG |
| 1654485 | ACGTTGGATGTTGTACCACTGCACTCTAGC | ACGTTGGATGCCTGACTCTACAGTTCTTGC |
| 1654491 | ACGTTGGATGCAGACGTCCGTGCTTTCACC | ACGTTTGGATGTCCAGGAACAGACGGAGGTC |
| 1654495 | ACGTTGGATGATGACCATTGCTCGTCTGTG | ACGTTGGATGGCTTTCTGCAGAGGTTGTCG |
| 1654496 | ACGTTGGATGAATCACAAATGGCAACACGG | ACGTTGGATGTTTGGATGCTGGCACTTGTG |
| 1654497 | ACGTTGGATGACCCCATGCTGTGTTTTCTC | ACGTTGGATGCAGAAGACTACCTGATTTGC |
| 1654498 | ACGTTGGATGCTTCCCACACCCACTATATC | ACGTTGGATGGTTAGTGAGTCGGTGACATC |
| 1654499 | ACGTTGGATGCACTACCTCTCTAGCAACTG | ACGTTGGATGACCTCAGATGATCTGCCCAC |
| 1654503 | ACGTTGGATGTCCTTGGCTTGTGGCCCTTC | ACGTTGGATGAGCCAGGGCAACGTTTGAAG |
| 1654504 | ACGTTGGATGCCACCCCATGATTCCATTTC | ACGTTGGATGTGCTGTGATGCACCTTTGAC |
| 1654505 | ACGTTGGATGCCCTGTCTCTCTAAAACCAC | ACGTTTGGATGATTCAAGCAGTTCTCGTGCC |
| 1671133 | ACGTTGGATGGTGGTCTCAACTTGGCTATC | ACGTTGGATGCCAGATAGGATTCCAGGTTC |
| 1671140 | ACGTTGGATGAGTCTGACAAGAGAGTCAGC | ACGTTGGATGTCCTTTACCTACCCACATCC |
| 1671148 | ACGTTGGATGGCCATCCTTCTGTCTTTTCC | ACGTTGGATGAGTGGCTCATGCCTGTAATC |
| 1671149 | ACGTTGGATGCTTTTCCCAAGTGACTCACC | ACGTTGGATGAAAAGAATGGCTGGCCACAG |
| 1671150 | ACGTTGGATGGTGCTATGATCAAATCAGGG | ACGTTGGATGACACCACTGCACTCTAGCTC |
| 1671151 | ACGTTGGATGGGAAAACCAGACAAGAGCAC | ACGTTGGATGTGACTCTGTTCCATCCTCTG |
| 1671152 | ACGTTGGATGAGGGCTGTGCAGAGGCCGCTT | ACGTTGGATGTGAACATCCTGTCGGCCTCC |
| 1671153 | ACGTTGGATGCCTACTCCGAACACACACAC | ACGTTGGATGATTATAGGCATGAGGCACCG |
| 1671169 | ACGTTGGATGTCCTGTTGCTGGACACTATC | ACGTTGGATGTCACACCTTCCGAGGATTTAG |
| 1671170 | ACGTTGGATGAGGTGACAGTGCTGTACCTG | ACGTTGGATGACAAAGAACAGTGAGAGGGC |
| 1671171 | ACGTTGGATGAAGCAAGATACCGTCTCAGA | ACGTTGGATGCCGGGAAATGGAATAATTCC |
| 1671176 | ACGTTGGATGTGGAGCCACTTATGGAGAAC | ACGTTGGATGACCCCAACTGAAACACAGAC |
| 1671178 | ACGTTGGATGTAATCCCAGCACTTTGGGAG | ACGTTGGATGCATGTTTGCCAGGCTGGACT |
| 1671182 | ACGTTGGATGATAGGGCGGCTTTTCTCCTG | ACGTTGGATGCCTGGGAACTGAATGTCTCG |
| 1671187 | ACGTTGGATGAGTGCTCAGCAACGATTACG | ACGTTGGATGGAGGGCTGCAGGTTGAGAAA |
| 1671188 | ACGFTTGGATGGGAACCGCAGATGGACAATG | ACGTTGGATGAGATCACAGAGTGAGGAGAG |
| 1671191 | ACGTTGGATGTCGGACGCACACAGACTGTAG | ACGTTGGATGGGAAAGCGTATCTGCAGAGG |
| 1671192 | ACGTTGGATGTGGTAAGAGACGGACAGTTC | ACGTTGGATGTCAGCAGAAAGGAGTGTGAG |
| 1671196 | ACGTTGGATGTTGCTAGGCAACAGGCACTC | ACGTTGGATGTCTGTATCTGAGCCTCACTG |
| 1671198 | ACGTTGGATGATGAAACTAAGGCACATGGC | ACGTTGGATGCTTATAATCTACCCTCTTAGC |
| 1671199 | ACGTTGGATGGCTGAAATTTGCTAAGAGGG | ACGTTGGATGGACAGTTACTACTAGCAAGC |
| 1671214 | ACGTTGGATGAGGCGGAGAATGATCCGGTG | ACGTTGGATGACGCCATCATTCGTGCATCC |
| 1671215 | ACGTTGGATGTTCTCCAAAGCACCCAAGTG | ACGTTGGATGATGCTGGGCTTGCTTTTTCC |
| 1671216 | ACGTTTGGATGTGCTTGGGAGCAAGTTACAG | ACGTTGGATGTTCCCCCTCCTGGTATTTAC |
| 1671217 | ACGTTGGATGTTGTCTCCATTCCTCCCTGG | ACGTTGGATGTCTTGTCTTGCCCTCTCGCT |
| 1671218 | ACGTTGGATGTGAGTCTGGTAGGCAACTTC | ACGTTGGATGTAGAAGCCAGTCGCTACATC |
| 1671219 | ACGTTGGATGTGATCTCGGCTCACTGCAAG | ACGTTGGATGAAATTAGCTGGGCATGGTGG |
| 1671221 | ACGTTGGATGTGGTGAAACCCCATTTCTAC | ACGTTGGATGGGTTCAAGGGATTCTCCTGC |
| 1671223 | ACGTTGGATGTCAAGTGATTCTCCTGCCTC | ACGTTGGATGCCCACCTCTACTGAAAATAC |
| 1671224 | ACGTTGGATGTGAGTCTCACTCTTGTTGCC | ACGTTGGATGCAGGAGAATCACTTTGAACCC |
| 1671225 | ACGTTGGATGTATAGGCGTGAGCCACTATG | ACGTTGGATGCTATTGGAAGCTACATGCTC |
| 1671226 | ACGTTGGATGTATTGGCCAGACTGGACTTC | ACGTTGGATGAGTTACTCAGGAGGCTAAGG |
| 1671227 | ACGTTGGATGGGTTTCTGTTCAGAGATTCG | ACGTTGGATGTGCAGTGAGCCTAGATCATG |
| 1671228 | ACGTTGGATGTCAGCCTCCCAGGGATTAAG | ACGTTGGATGACATGGTGAAAACTCGTCTC |
| 1869616 | ACGTTGGATGTAATCCCAGCTACTCGGAAG | ACGTTGGATGACGGTGGCTCACTTTCAACCT |
| 2019599 | ACGTTGGATGGTGCTGGGATTATAGGCATG | ACGTTGGATGTACTCCGAACACACACACAC |
| 2116883 | ACGTTGGATGATTACAGGCATGAGCCACTG | ACGTTGGATGCACGCGCAGTTCAATTTCTC |
| 2124090 | ACGTTGGATGTCTGACAAAGCTGGAAGCTG | ACGTTGGATGCTGATAAACAAGGCTGTGGG |
| 2163833 | ACGTTGGATGGATATTGGTGAGTATGCAGAG | ACGTTGGATGAACTGTTTTCCACAGCAGGG |
| 2217659 | ACGTTGGATGTTCCCCCCTTCTCCTTTTTC | ACGTTGGATGATGAGGTAACTTACCTTATG |
| 2304167 | ACGTTGGATGGTTTGGTTCCCAGAGACTTC | ACGTTGGATGAGGATGACTTACTCACCAGC |
| 2304168 | ACGTTTGGATGTCAGCAGAAAGGAGTGTGAG | ACGTTGGATGTGGTAAGAGACGGACAGTTC |
| 2365593 | ACGTTGGATGTGACGCAGTAAGACTCCATC | ACGTTGGATGCAAAGTGCTGGGATTACAGG |
| 2365721 | ACGTTGGATGTTGTACAGCCTGCAAGCAAC | ACGTTGGATGAGATCGCGCCATTGCACTCA |
| 2569513 | ACGTTGGATGGTTGGCGTTTTTGTTTGCAC | ACGTTGGATGTCTCATAGTATTCTGCAGGG |
| 2569514 | ACGTTGGATGTCCCTGCAGAATACTATGAG | ACGTTGGATGAGAGTGTTGGGATTACAGGC |
| 2886414 | ACGTTGGATGGGTGTGCTTTACAAATGCTG | ACGTTGGATGAACTGAGATCACTCCACTGC |
| 2886415 | ACGTTGGATGTGACGCAGTAAGACTCCATC | ACGTTGGATGCAAAGTGCTGGGATTACAGG |
| 3745912 | ACGTTGGATGACGTCTTCTGAGGCACAGAG | ACGTTGGATGGCTGTTAGAGGCTGGCAGG |
| 3786863 | ACGTTGGATGTGACCAACAGAAGTCTCAGG | ACGTTGGATGTTGACCTCAGGTGATCCATC |

[0281] TABLE 9

| | | |
|---|---|---|
| dbSNP | Extend | Term |
| rs# | Primer | Mix |

| | | |
|---|---|---|
| 10666 | TGCAGGTGAGCACTGCCC | ACG |
| 172006 | GCAAGACTCCATCTCAA | ACT |
| 269909 | AAGCATAGATCAGATAAGGAA | ACT |
| 269910 | ATCTATGCTTGTCCTTTCAT | ACT |
| 269911 | GCTCAGCTACTTTTTGTAT | CGT |
| 269912 | CAAGATGGTGTCTTCGGC | ACT |
| 269913 | ACAGTGTGGACCGATTTCC | ACT |
| 269915 | AGACAAGTCTCACTCTG | ACG |
| 269916 | GGCGGCTCACACCTGTAAT | ACG |
| 703464 | CTCCTGCCTCAGCCTCC | ACG |
| 703465 | TGGCATTTGAGACAGGA | ACT |
| 703467 | CATTCACCATGTCTGTGTGAG | ACG |
| 703468 | CTTCATAAAAGAAAAGATGACA | ACG |
| 754235 | CATGCCATTGTACTCCAGCC | ACG |
| 775821 | CCTGCCAGCCTCTAACAGC | ACG |
| 775822 | TAGTGATGTCTGCTTCAG | ACT |
| 775894 | TTGCCCAGGCTGGCCTC | ACT |
| 775900 | GAATGCCAACCTCCCTTCC | ACT |
| 775903 | TCTGAGTGACAGAGCGA | ACT |
| 776251 | GCTCCCCGCAACCTCCGC | ACG |
| 892088 | GCCTCGGCCGCAATCACA | ACT |
| 892089 | CGGTCACCGTGATGATGGG | ACT |
| 892090 | AGAATCCCGAGAGATGGTAC | CGT |
| 892091 | GTCCTTCACCTGAGCTTCC | ACT |
| 1036231 | GTGTTTACTGTTCAAGGCAAGT | ACT |
| 1036232 | GGCAACAGAGCAAGACT | ACG |
| 1043673 | ACTGAGAAACATCATCCCTGGG | CGT |
| 1043678 | AGTCACAGGCAGTTCACC | CGT |
| 1043680 | CTGTGACTCCTCTCCTCCCC | ACT |
| 1043684 | CTGTTTTATACCTGCACAC | ACT |
| 1054796 | ACGCCAGGCAGGCTCTCA | ACT |
| 1059211 | CGCCTACTGCCAGAGCAAGCT | ACG |
| 1064675 | ATTCCTTTTTGCTGAAATAATGAA | ACT |
| 1560714 | TGGGGCGTGATGGCTCA | ACG |
| 1613662 | CAACAGAACCACCTTCC | ACG |
| 1625609 | GTGCACACCTGTAATCC | ACG |
| 1625689 | CAGGGCTCAAGCGATTCTCC | ACG |
| 1626971 | TCGCCTGGCCAAAAAAA | ACT |
| 1654406 | CATTGTACCCCAGGTTGAAAAT | CGT |
| 1654409 | GTGGTACCACACCCAGCTAATT | ACT |
| 1654410 | ATCATACTGAGATGCTATCAGAA | ACT |
| 1654411 | GCACTTTGGGAGGTTGAGG | ACT |
| 1654412 | CATTCTCCCACCTCAGCCCCC | ACG |
| 1654413 | CCCGTTTGATTTCCGGGTC | CGT |
| 1654415 | GGCCCCATCACCCAAAA | ACG |
| 1654416 | GACCGTCTCATTCACAAAC | ACT |
| 1654419 | TTGGTGCTTCACTCTGAGAC | ACT |
| 1654420 | GAGAACCGCTGATCAATGCA | CGT |
| 1654421 | GCATGCAGCTCCCGTCC | ACT |
| 1654424 | CCACCTATGGCCGCGCCCCT | ACT |
| 1654425 | CAGGGACCCATACCTGTGGTC | ACT |
| 1654438 | TCAGCCTCCTGAGTAGCTGG | ACT |
| 1654439 | GTTTCTGGAGCACTCCGGT | ACT |
| 1654441 | GATAAGCCTGGCCAACA | ACG |
| 1654442 | ATGATCTCGGCTCACTGCAA | ACT |
| 1654444 | TATGGATCTTTCTAGTCTTGTTT | CGT |
| 1654446 | ACTGATTACAGGCGTGC | ACT |
| 1654447 | CCCGATGCCTGTGTTGGC | ACT |
| 1654448 | AGTGCTGGGATTACAGG | ACG |
| 1654449 | AATCTCTCTTTTCCCTACACA | ACG |
| 1654451 | TAATGCGTACAGCAGCC | CGT |
| 1654452 | ACTGGAGGAGGATGCACTTA | ACG |
| 1654459 | ATGCACAGAAACAAGGATCTA | ACT |
| 1654485 | CTTGCTTTTTTTTTTTTTGGACAG | ACT |
| 1654491 | GCACCCCGAGCCTTTCCAG | ACT |
| 1654495 | TTGTCGTAAGTCTCTCCTCTCTT | CGT |
| 1654496 | CGGGAAGGTTGAAGTTGGAC | CGT |
| 1654497 | CCATTTACAACCAATTGC | ACT |
| 1654498 | CTTTGTGGGACTTCTTITTTA | ACT |
| 1654499 | ACCCTGGCCTCCCTAAC | ACT |
| 1654503 | GGGCAACGTTTGAAGATGCTCTGC | ACG |
| 1654504 | CACCTTTGACTCTTGAGCC | ACT |
| 1654505 | TAGCTATGTGCCACCATGCC | ACG |
| 1671133 | GATTGTAGCTAACTCACAAGG | ACT |
| 1671140 | TACCTACCCACATCCTATAAAA | ACG |
| 1671148 | CCTGTAATCCCGGCACT | ACT |
| 1671149 | CTGGCCACAGTGGCTCA | ACG |
| 1671150 | CGGGTGACGAAGCCTGAC | ACG |
| 1671151 | TCCTCTGTGCAAAATCCTCC | ACG |
| 1671152 | CTCCATCCTGACCCCCGT | ACT |
| 1671153 | CTGTGGAATTGTGCCTC | CGT |
| 1671169 | CATGTCCCACAGAGGCTAAC | ACT |
| 1671170 | GAGAGGGCAATGCCTCAGAG | CGT |
| 1671171 | TTCTGGGATTCTCTAGAGGG | ACT |
| 1671176 | AGACATCATCACATCACACCA | CGT |
| 1671178 | CCAGGCTGGACTCGAACT | ACG |
| 1671182 | ACTGAATGTCTCGGTATAAAACC | ACG |
| 1671187 | CAGGTTGAGAAAGCTCTA | CGT |
| 1671188 | CAGAGTGAGGAGAGTGAGAC | ACT |
| 1671191 | GAGCGGTTAGAAGATGTGCT | ACT |
| 1671192 | AAGCCTGTAGGCTTTTAA | ACG |
| 1671196 | GGGATGACTGAATGAGACAGTA | ACG |
| 1671198 | CCCTCTTAGCAAATTTCAGCT | ACT |
| 1671199 | TAACTTTTTTGTGTGTGAGAA | ACG |
| 1671214 | CGTGCATCCTTCCCACCTA | ACG |
| 1671215 | GTACTCAAGATGATGTAA | CGT |
| 1671216 | TTACACCCTGGAGTGGTCC | ACT |
| 1671217 | TGCCCTCTCGCTGGCTGG | ACG |
| 1671218 | CAAAGGGAGGTGGTCGCAC | ACG |
| 1671219 | CAGGAGAATGGTGTGAACC | ACG |
| 1671221 | AGCTGGGATTACAGGCA | ACG |
| 1671223 | TACAAAATTAGCTGGGCATG | ACT |
| 1671224 | CTGTGAGCCGAGATTGC | ACT |
| 1671225 | CTCAATGTGATCCTCCT | ACT |
| 1671226 | GCAGGAGAATCACTTGAACTT | ACT |
| 1671227 | AGATCATGCCATTGCCAGC | ACT |
| 1671228 | ACAGAAGTTAGCTGGGC | ACT |
| 1869616 | CTTCAACCTCCGCCTCCTGG | ACT |
| 2019599 | GAAAAGCATGGGCCGGGCA | ACG |
| 2116883 | CATACTCACCAATATCTGCT | ACT |
| 2124090 | GCTTTGTGTTCTTTCTAGTC | ACT |
| 2163833 | GCCAGCAATGCACGCGCAGT | ACG |
| 2217659 | GTAACTTACCTAATGATAGAGG | ACG |
| 2304167 | TGACTCCTTTGGACTGG | ACG |
| 2304168 | CAGTTCGGTGAAGTGGTT | ACT |
| 2365593 | GGTGTGAGCCACCACGCC | ACG |
| 2365721 | AGACTCCCTCTCAAAATAA | ACG |
| 2569513 | AGGGATAAGCATGAAACCACT | ACG |
| 2569514 | GCGTGAGCCACCACGCC | ACG |
| 2886414 | GGGTGACAAAGTGAGACTC | ACG |
| 2886415 | CACGCCTGGCTAAGCCT | ACT |
| 3745912 | GGCTGGCAGGCCAGGTCAAC | ACT |
| 3786863 | GTGCTGGGATTACAGGC | ACT |

Genetic Analysis Allelotyping Results

[0282] Allelotyping results are shown for cases and controls in Table 10. The allele frequency for the A2 allele is noted in the fifth and sixth columns for breast cancer pools and control pools, respectively, where “AF” is allele frequency. The allele frequency for the A1 allele can be easily calculated by subtracting the A2 allele frequency from 1 (A1 AF=1−A2 AF). For example, the SNP re269911has the following case and control allele frequencies: case A1 (A)=0.907; case A2 (T)=0.093; control A1 (A)=0.864; and control A2 (T)=0.136, where the nucleotide is provided in paranthesis. SNPs with blank allele frequencies were untyped.

TABLE 10

| dbSNP | Position in | Chromosome | | A2 Case | A2 Control | |
|---|---|---|---|---|---|---|
| rs# | | Position | A1/A2 Allele | AF | AF | p-Value |
| 269911 | 185 | 60156885 | A/T | 0.136 | 0.093 | 0.0242 |
| 703464 | 237 | 60156937 | G/A | 0.219 | 0.197 | 0.3696 |
| 703465 | 641 | 60157341 | C/G | 0.608 | 0.634 | 0.3828 |
| 269912 | 719 | 60157419 | A/G | 0.621 | 0.651 | 0.3011 |
| 269913 | 990 | 60157690 | T/C | 0.354 | 0.320 | 0.2275 |
| 269915 | 2908 | 60159608 | C/T | 0.776 | 0.797 | 0.3802 |
| 269916 | 3140 | 60159840 | G/A | 0.137 | 0.123 | 0.5037 |
| 172006 | 3880 | 60160580 | A/G | 0.172 | 0.142 | 0.1703 |
| 703467 | 4494 | 60161194 | C/T | 0.321 | 0.273 | 0.0759 |
| 703468 | 5107 | 60161807 | G/A | 0.187 | 0.159 | 0.2093 |
| 2217659 | 5220 | 60161920 | G/A | 0.167 | 0.127 | 0.0593 |
| 775894 | 6031 | 60162731 | A/G | 0.152 | 0.131 | 0.3098 |
| 775900 | 8670 | 60165370 | A/G | 0.632 | 0.667 | 0.2304 |
| 1654491 | 13794 | 60170494 | T/C | 0.005 | 0.005 | 0.9971 |
| 775903 | 16356 | 60173056 | A/G | 0.818 | 0.835 | 0.4460 |
| 1036231 | 17164 | 60173864 | T/C | 0.177 | 0.178 | 0.9755 |
| 1036232 | 17264 | 60173964 | G/A | 0.690 | 0.713 | 0.3949 |
| 1671223 | 20537 | 60177237 | T/G | 0.951 | 0.978 | 0.0143 |
| 1671224 | 20637 | 60177337 | A/G | 0.235 | 0.244 | 0.7269 |
| 1654495 | 20900 | 60177600 | C/A | 0.534 | 0.536 | 0.9379 |
| 1654496 | 21155 | 60177855 | C/A | 0.315 | 0.289 | 0.3567 |
| 1654497 | 21795 | 60178495 | T/C | 0.307 | 0.315 | 0.7771 |
| 1671225 | 21931 | 60178631 | T/G | 0.352 | 0.344 | 0.7785 |
| 1671226 | 22167 | 60178867 | C/G | 0.520 | 0.482 | 0.2147 |
| 1671227 | 22656 | 60179356 | T/C | 0.468 | 0.463 | 0.8612 |
| 1654498 | 23108 | 60179808 | T/C | 0.385 | 0.387 | 0.9372 |
| 1671228 | 23404 | 60180104 | T/C | 0.412 | 0.403 | 0.7790 |
| 1654499 | 24287 | 60180987 | T/C | 0.349 | 0.355 | 0.8197 |
| 1869616 | 24480 | 60181180 | A/C | 0.909 | 0.925 | 0.3271 |
| 1654503 | 24592 | 60181292 | C/T | 0.384 | 0.409 | 0.3829 |
| 1654504 | 24878 | 60181578 | T/C | 0.689 | 0.651 | 0.1817 |
| 1671133 | 26370 | 60183070 | A/C | 0.345 | 0.348 | 0.9023 |
| 1654505 | 27056 | 60183756 | G/A | 0.257 | 0.263 | 0.8407 |
| 3786863 | 27874 | 60184574 | A/G | 0.989 | 0.989 | 0.9843 |
| 1560714 | 31248 | 60187948 | G/A | 0.970 | 0.981 | 0.2419 |
| 1654406 | 31458 | 60188158 | G/T | 0.437 | 0.437 | 0.9994 |
| 1043673 | 31553 | 60188253 | C/A | 0.354 | 0.374 | 0.4936 |
| 1043678 | 31637 | 60188337 | G/T | 0.530 | 0.525 | 0.8676 |
| 1043680 | 31668 | 60188368 | C/G | 0.544 | 0.561 | 0.5849 |
| 1043684 | 31752 | 60188452 | A/G | 0.317 | 0.312 | 0.8472 |
| 1671140 | 37643 | 60194343 | G/A | 0.122 | 0.116 | 0.7440 |
| 1654409 | 43941 | 60200641 | A/C | 0.557 | 0.528 | 0.3425 |
| 1654410 | 44134 | 60200834 | T/C | 0.431 | 0.462 | 0.3094 |
| 1654411 | 44329 | 60201029 | A/C | 0.639 | 0.578 | 0.0398 |
| 1671148 | 44343 | 60201043 | A/C | 0.859 | 0.824 | 0.1102 |
| 1671149 | 44362 | 60201062 | G/A | 0.798 | 0.745 | 0.0377 |
| 1671150 | 44818 | 60201518 | G/A | 0.116 | 0.148 | 0.1189 |
| 1654412 | 44917 | 60201617 | C/T | 0.371 | 0.359 | 0.6627 |
| 1671151 | 45215 | 60201915 | G/A | 0.771 | 0.724 | 0.0765 |
| 1671152 | 45666 | 60202366 | T/G | 0.779 | 0.720 | 0.0234 |
| 1654413 | 45680 | 60202380 | T/A | 0.186 | 0.257 | 0.0048 |
| 2304167 | 46402 | 60203102 | C/T | 0.725 | 0.675 | 0.0720 |
| 1671153 | 46510 | 60203210 | G/T | 0.785 | 0.700 | 0.0016 |
| 2019599 | 46554 | 60203254 | C/T | 0.051 | 0.041 | 0.4200 |
| 1654485 | 46823 | 60203523 | A/C | 0.516 | 0.525 | 0.7872 |
| 1671188 | 47714 | 60204414 | T/G | 0.567 | 0.595 | 0.3451 |
| 1671191 | 48963 | 60205663 | T/C | 0.131 | 0.159 | 0.1931 |
| 1654415 | 49157 | 60205857 | C/T | 0.765 | 0.714 | 0.0536 |
| 1671192 | 49254 | 60205954 | G/A | 0.136 | 0.180 | 0.0436 |
| 2304168 | 49257 | 60205957 | A/G | 0.200 | 0.174 | 0.2713 |
| 1654416 | 49356 | 60206056 | T/C | 0.130 | 0.174 | 0.0432 |
| 1654419 | 55202 | 60211902 | A/G | 0.672 | 0.627 | 0.1243 |
| 1654420 | 55527 | 60212227 | T/A | 0.704 | 0.669 | 0.2206 |
| 1613662 | 55916 | 60212616 | G/A | 0.778 | 0.739 | 0.1347 |
| 2886415 | 56402 | 60213102 | T/G | 0.624 | 0.561 | 0.0324 |
| 2365593 | 56413 | 60213113 | C/T | 0.131 | 0.151 | 0.3369 |
| 2886414 | 56685 | 60213385 | G/A | 0.796 | 0.755 | 0.0976 |
| 1654421 | 56783 | 60213483 | A/G | 0.651 | 0.616 | 0.2323 |
| 1654424 | 58044 | 60214744 | A/G | 0.056 | 0.051 | 0.7154 |
| 1654425 | 58301 | 60215001 | T/C | 0.582 | 0.523 | 0.0464 |
| 892089 | 58382 | 60215082 | A/G | 0.654 | 0.622 | 0.2732 |
| 892090 | 58393 | 60215093 | G/T | 0.203 | 0.238 | 0.1618 |
| 1671196 | 58869 | 60215569 | C/T | 0.752 | 0.699 | 0.0518 |
| 1671198 | 59155 | 60215855 | T/C | 0.037 | 0.048 | 0.3599 |
| 1671199 | 59189 | 60215889 | G/A | 0.181 | 0.203 | 0.3495 |
| 1625609 | 62546 | 60219246 | C/T | 0.063 | 0.063 | 0.9551 |
| 1625689 | 62568 | 60219268 | G/A | Not Alellotyped | | |
| 1654438 | 70983 | 60227683 | A/G | 0.885 | 0.890 | 0.7775 |
| 2569513 | 71465 | 60228165 | G/A | 0.777 | 0.723 | 0.0373 |
| 2569514 | 71538 | 60228238 | G/A | 0.409 | 0.340 | 0.0171 |
| 1671214 | 72144 | 60228844 | G/A | 0.345 | 0.392 | 0.1048 |
| 1671215 | 72340 | 60229040 | C/A | 0.596 | 0.541 | 0.0649 |
| 1054796 | 72527 | 60229227 | C/G | 0.198 | 0.121 | 0.0008 |
| 1654439 | 72968 | 60229668 | T/G | 0.757 | 0.712 | 0.0906 |
| 1671216 | 73397 | 60230097 | A/G | 0.239 | 0.273 | 0.1934 |
| 1671217 | 73553 | 60230253 | G/A | 0.166 | 0.217 | 0.0333 |
| 1671218 | 73720 | 60230420 | C/T | 0.508 | 0.450 | 0.0542 |
| 1654441 | 74190 | 60230890 | C/T | 0.893 | 0.901 | 0.6470 |
| 1654442 | 74687 | 60231387 | T/G | 0.955 | 0.947 | 0.5733 |
| 1671219 | 74699 | 60231399 | G/A | 0.232 | 0.217 | 0.5745 |
| 10666 | 75580 | 60232280 | C/T | 0.871 | 0.879 | 0.6976 |
| 1626971 | 76345 | 60233045 | T/C | 0.099 | 0.141 | 0.0329 |
| 1671221 | 76506 | 60233206 | G/A | 0.007 | 0.003 | 0.3854 |
| 754235 | 77554 | 60234254 | G/A | 0.445 | 0.486 | 0.1719 |
| 775821 | 77889 | 60234589 | C/T | 0.295 | 0.310 | 0.5716 |
| 3745912 | 77919 | 60234619 | A/G | 0.730 | 0.736 | 0.8182 |
| 775822 | 78866 | 60235566 | A/G | 0.983 | 0.991 | 0.2487 |
| 1059211 | 79061 | 60235761 | C/T | 0.231 | 0.205 | 0.2919 |
| 2124090 | 83777 | 60240477 | A/C | 0.681 | 0.772 | 0.0010 |
| 1671171 | 84360 | 60241060 | T/G | 0.222 | 0.259 | 0.1467 |
| 1671170 | 84631 | 60241331 | T/A | 0.546 | 0.517 | 0.3441 |
| 1654444 | 85775 | 60242475 | G/T | 0.170 | 0.208 | 0.1062 |
| 2365721 | 87153 | 60243853 | G/A | 0.443 | 0.409 | 0.2552 |
| 1654446 | 89650 | 60246350 | A/G | 0.430 | 0.388 | 0.1582 |
| 1654447 | 89895 | 60246595 | A/G | 0.647 | 0.624 | 0.4372 |
| 1671176 | 90103 | 60246803 | C/A | 0.246 | 0.274 | 0.2919 |
| 1654448 | 90234 | 60246934 | G/A | 0.136 | 0.164 | 0.1947 |
| 1671178 | 90309 | 60247009 | G/A | 0.037 | 0.036 | 0.9262 |
| 1654449 | 90376 | 60247076 | G/A | 0.167 | 0.186 | 0.4301 |
| 1671182 | 90925 | 60247625 | C/T | 0.211 | 0.207 | 0.8737 |
| 1654451 | 91561 | 60248261 | A/T | 0.734 | 0.691 | 0.1110 |
| 1654452 | 91605 | 60248305 | G/A | 0.322 | 0.351 | 0.3085 |
| 1671169 | 92954 | 60249654 | T/C | 0.532 | 0.554 | 0.4612 |
| 1654459 | 94228 | 60250928 | A/G | 0.137 | 0.158 | 0.3262 |

| | | | | | |
|---|---|---|---|---|---|
| 269909 | Not Mapped | G/C | 0.777 | 0.799 | 0.3619 |
| 269910 | Not Mapped | T/G | 0.234 | 0.190 | 0.0702 |
| 776251 | Not Mapped | G/A | 0.013 | 0.008 | 0.3916 |
| 892088 | Not Mapped | A/G | 0.540 | 0.523 | 0.5742 |
| 892091 | Not Mapped | C/G | 0.471 | 0.478 | 0.8145 |
| 1043680 | Not Mapped | C/G | 0.544 | 0.561 | 0.5849 |
| 1064675 | Not Mapped | A/G | 0.193 | 0.210 | 0.4668 |
| 1671187 | Not Mapped | T/A | 0.607 | 0.594 | 0.6661 |
| 2116883 | Not Mapped | T/C | 0.177 | 0.227 | 0.0409 |
| 2163833 | Not Mapped | G/A | 0.156 | 0.209 | 0.0227 |

[0283] FIG. 14 shows the proximal SNPs in and around the GP6 gene. The position of each SNP on the chromosome is presented on the x-axis. The y-axis gives the negative logarithm (base 10) of the p-value comparing the estimated allele in the case group to that of the control group. The minor allele frequency of the control group for each SNP designated by an X or other symbol on the graphs in FIG. 14 can be determined by consulting Table 10. By proceeding down the Table from top to bottom and across the graphs from left to right the allele frequency associated with each symbol shown can be determined.

[0284] To aid the interpretation, multiple lines have been added to the graph. The broken horizontal lines are drawn at two common significance levels, 0.05 and 0.01. The vertical broken lines are drawn every 20 kb at assist in the interpretation of distances between SNPs. Two other lines are drawn to expose linear trends in the association of SNPs to the disease. The light gray line (or generally bottom-most curve) is a nonlinear smoother through the data points on the graph using a local polynomial regression method (W. S. Cleveland, E. Grosse and W. M. Shyu (1992) Local regression models. Chapter 8 of Statistical Models in S eds J. M. Chambers and T. J. Hastie, Wadsworth & Brooks/Cole.). The black line (or generally top-most curve, e.g., see peak in left-most graph just to the left of position 92150000) provides a local test for excess statistical significance to identify regions of association. This was created by use of a 10 kb sliding window with 1 kb step sizes. Within each window, a chi-square goodness of fit test was applied to compare the proportion of SNPs that were significant at a test wise level of 0.01, to the proportion that would be expected by chance alone (0.05 for the methods used here). Resulting p-values that were less than 10⁻⁸ were truncated at that value.

[0285] Finally, the gene or genes present in the loci region of the proximal SNPs as annotated by Locus Link (http address: www.ncbi.nlm.nih.gov/LocusLink/) are provided on the graph. The exons and introns of the genes in the covered region are plotted below each graph at the appropriate chromosomal positions. The gene boundary is indicated by the broken horizontal line. The exon positions are shown as thick, unbroken bars. An arrow is place at the 3′ end of each gene to show the direction of transcription.

[0286] Additional Genotyping

[0287] In addition to the SNP rs1671152, another SNP (rs1654416) was genotyped in the discovery cohort and found to be associated with breast cancer with a p-value of 0.0737. See Table 13.

[0288] The methods used to verify and genotype the proximal SNP of Table 13 are the same methods described in Examples 1 and 2 herein. The PCR primers and extend primers used in these assays are provided in Table 11 and Table 12, respectively.

TABLE 11

| | | |
|---|---|---|
| dbSNP | First | Second |
| rs# | PCR primer | PCR primer |

| | | |
|---|---|---|
| 1654416 | ACGTTGGATGTCTGCTGAGCATGAAATGCC | ACGTTGGATGCTGAACTGACCGTCTCATTC |

[0289] TABLE 12

| | | |
|---|---|---|
| dbSNP | Extend | Term |
| rS# | Primer | Mix |

| | | |
|---|---|---|
| 1654416 | TGACCGTCTCATTCACAAAC | ACT |

[0290] Table 13, below, shows the case and control allele frequencies along with the p-values for the SNPs genotyped. The disease associated allele of column 4 is in bold and the disease associated amino acid of column 5 is also in bold. The chromosome position provided corresponds to NCBI's Build 33.

TABLE 13
Genotpying Results

| | | | | Amino | | | | |
|---|---|---|---|---|---|---|---|---|
| dbSNP | Position in | Chromosome | Alleles | Acid | AF | AF | | Odds |
| rs# | | Position | (A1/A2) | Change | F case | F control | p-value | Ratio |
| 1654416 | 49356 | 60206056 | T/C | E237K | T = 0.840 | T = 0.800 | 0.0737 | 0.75 |
| | | | | | C = 0.160 | C = 0.200 | | |

### Example 4

### LAMA4 Proximal SNPs

[0291] It has been discovered that a polymorphic variation (FCH-1159) in a region that encodes laminin, alpha (LAMA4) is associated with the occurrence of breast cancer (see Examples 1 and 2). Subsequently, SNPs proximal to the incident SNP (FCH-1159) were identified and allelotyped in breast cancer sample sets and control sample sets as described in Examples 1 and 2. Approximately sixty-eight allelic variants located within the LAMA4 region were identified and allelotyped. The polymorphic variants are set forth in Table 14. The chromosome position provided in column four of Table 14 is based on Genome “Build 33” of NCBI's GenBank.

TABLE 14

| dbSNP | | Position in | Chromosome | Allele |
|---|---|---|---|---|
| rs# | Chromosome | | Position | Variants |
| 969138 | 6 | 184 | 112446684 | C/G |
| 1418499 | 6 | 506 | 112447006 | T/C |
| 2157550 | 6 | 3981 | 112450481 | C/G |
| 764587 | 6 | 7815 | 112454315 | A/G |
| 3734287 | 6 | 7875 | 112454375 | G/A |
| 2032565 | 6 | 10775 | 112457275 | T/A |
| 2032566 | 6 | 10786 | 112457286 | T/C |
| 1050349 | 6 | 11013 | 112457513 | G/C |
| LAMA4_SNP1 | 6 | 11020 | 112457520 | C/T |
| 2032568 | 6 | 11101 | 112457601 | A/G |
| 2072019 | 6 | 14171 | 112460671 | A/G |
| 2072020 | 6 | 14278 | 112460778 | G/A |
| 1480646 | 6 | 16512 | 112463012 | G/A |
| 2072026 | 6 | 16706 | 112463206 | C/T |
| 763247 | 6 | 18442 | 112464942 | A/C |
| 744006 | 6 | 20286 | 112466786 | C/T |
| 3822941 | 6 | 21591 | 112468091 | G/A |
| 3777942 | 6 | 22275 | 112468775 | A/T |
| 3734286 | 6 | 25318 | 112471818 | C/G |
| 3777941 | 6 | 27997 | 112474497 | C/T |
| 2277084 | 6 | 29840 | 112476340 | A/G |
| 3798359 | 6 | 31088 | 112477588 | C/G |
| 3798357 | 6 | 31258 | 112477758 | T/C |
| 2227237 | 6 | 32367 | 112478867 | G/A |
| 2213838 | 6 | 32427 | 112478927 | T/C |
| 3752577 | 6 | 33671 | 112480171 | G/A |
| LAMA4_SNP2 | 6 | 38796 | 112485296 | C/T |
| 971402 | 6 | 41530 | 112488030 | A/G |
| 971405 | 6 | 41874 | 112488374 | A/T |
| 2051649 | 6 | 44161 | 112490661 | A/G |
| 1050348 | 6 | 47502 | 112494002 | C/T |
| 2157544 | 6 | 51089 | 112497589 | T/G |
| 2157545 | 6 | 51205 | 112497705 | C/T |
| 2213839 | 6 | 53645 | 112500145 | G/A |
| LAMA4_SNP4 | 6 | 54280 | 112500780 | G/T |
| 3777934 | 6 | 57610 | 112504110 | A/G |
| 1894681 | 6 | 57740 | 112504240 | A/G |
| 2301512 | 6 | 60812 | 112507312 | G/C |
| 2301513 | 6 | 60837 | 112507337 | T/C |
| 2072029 | 6 | 64448 | 112510948 | T/C |
| 764071 | 6 | 65249 | 112511749 | T/G |
| 2269646 | 6 | 65482 | 112511982 | T/C |
| LAMA4_SNP5 | 6 | 66535 | 112513035 | C/T |
| 2072022 | 6 | 66789 | 112513289 | T/C |
| LAMA4_SNP6 | 6 | 67214 | 112513714 | C/A |
| 2237238 | 6 | 68347 | 112514847 | C/A |
| 3777932 | 6 | 69060 | 112515560 | T/C |
| 3777929 | 6 | 70100 | 112516600 | A/G |
| 3777928 | 6 | 70215 | 112516715 | G/T |
| 2157546 | 6 | 73687 | 112520187 | C/G |
| 3948760 | 6 | 73732 | 112520232 | A/G |
| 2237241 | 6 | 74183 | 112520683 | T/C |
| 2237242 | 6 | 74813 | 112521313 | A/G |
| 2237244 | 6 | 78136 | 112524636 | T/C |
| 3777927 | 6 | 79540 | 112526040 | C/T |
| 3777926 | 6 | 79655 | 112526155 | A/G |
| 3777925 | 6 | 79731 | 112526231 | T/C |
| 2239849 | 6 | 82111 | 112528611 | G/A |
| 2239850 | 6 | 82155 | 112528655 | T/G |
| 2237247 | 6 | 83479 | 112529979 | G/A |
| 2282853 | 6 | 84511 | 112531011 | G/C |
| 2282854 | 6 | 85290 | 112531790 | T/C |
| 2213840 | 6 | 90620 | 112537120 | G/A |
| 2068770 | 6 | 91127 | 112537627 | A/G |
| 2237248 | 6 | 92095 | 112538595 | G/A |
| 2237249 | 6 | 92679 | 112539179 | A/G |
| 2345808 | 6 | 94839 | 112541339 | T/G |
| 2157547 | 6 | 95220 | 112541720 | G/C |

[0292] Assay for Verifying and Allelotyping SNPs

[0293] The methods used to verify and allelotype the proximal SNPs of Table 14 are the same methods described in Examples 1 and 2 herein. The PCR primers and extend primers used in these assays are provided in Table 15 and Table 16, respectively. The methods used to verify and allelotype the proximal SNPs of Table 14 are the same methods described in Examples 1 and 2 herein. The PCR primers and extend primers used in these assays are provided in Table 15 and Table 16, respectively.

TABLE 15

| dbSNP | Forward | Reverse |
|---|---|---|
| rs# | PCR primer | PCR primer |
| LAMA4_SNP5 | ACGTTGGATGACAGTTCTTGGCTATCCTGG | ACGTTGGATGACTGGCCAGTGTAGGAATTG |
| LAMA4_SNP6 | ACGTTGGATGGAAAGGGATTGACTCAGGAG | ACGTTGGATGCTTCCTTCACCTGAAGATGG |
| LAMA4_SNP4 | ACGTTGGATGTTGAAGGACTGATCTATGGG | ACGTTGGATGAAAGCAACAGACAAGGCAAG |
| LAMA4_SNP1 | ACGTTGGATGCAGACTGGAAATGCGCAATG | ACGTTGGATGCGTATCTTCAAGATGCACAG |
| 1050348 | ACGTTGGATGTGTTCATGTCTTCGGCATCC | ACGTTGGATGCAGCTGGATGACTACAATGC |
| LAMA4_SNP2 | ACGTTGGATGAGGAATGCTTACAACGGAGG | ACGTTGGATGAACTCCCTTCATCCTTCCTC |
| 744006 | ACGTTGGATGTTGCCTTGAAGGTAGGCATG | ACGTTGGATGGGGTTAGCAGCTTAACTTTC |
| 763247 | ACGTTGGATGCCGGCCAAGACCAATACATC | ACGTTGGATGTGCAGACATGCACTATTCTC |
| 764071 | ACGTTGGATGCCACTTGGAAAGATTCAAGG | ACGTTGGATGTATTGTGACTTCTGCAGAAC |
| 764587 | ACGTTGGATGCAACATAGACCAGAAGTGGG | ACGTTGGATGTTCACATAGGGAAGGCCTTG |
| 969138 | ACGTTGGATGACTGGACCAAGGTAGATCAC | ACGTTGGATGCTCAGGCTAATCTCTCTAGG |
| 971402 | ACGTTGGATGCCACTTTTCTGTGGAAATATC | ACGTTTGGATGCAAGTTAATGAGTTTCTCCC |
| 971405 | ACGTTGGATGAAACAGTGCTTTTTGAAGGAG | ACGTTGGATGCTATCTCCAAAGGGTAACAG |
| 1050348 | ACGTTGGATGCAGCTGGATGACTACAATGC | ACGTTGGATGTGTTCATGTCTTCGGCATCC |
| 1050349 | ACGTTGGATGCTATGATTTTGGATTCAGCG | ACGTTGGATGACCTCATGGTATTTTGCATC |
| 1158747 | ACGTTGGATGTTGAAGGACTGATCTATGGG | ACGTTGGATGAAAGCAACAGACAAGGCAAG |
| 1418499 | ACGTTGGATGACCATAGGGAACTAGAAATC | ACGTTGGATGCTTTAAGATAGATTCCCAGGG |
| 1480646 | ACGTTGGATGCAGTGTCTCTTCCTTTCCAG | ACGTTGGATGCAAATTTCCACGAGCCTGAG |
| 1894681 | ACGTTGGATGTGGGATTCCCCTAAAGGATG | ACGTTGGATGAAGATCAGCAGCACCAAAGG |
| 2032565 | ACGTTGGATGAAAGAGCAACTGAAGGACCC | ACGTTGGATGTAAATTGGAACATCAACAGG |
| 2032566 | ACGTTGGATGTAAATTGGAACATCAACAGG | ACGTTGGATGAAAGAGCAACTGAAGGACCC |
| 2032567 | ACGTTGGATGCGTATCTTTCAAGATGCACAG | ACGTTGGATGAGACTGGAAATGCGCAATGG |
| 2032568 | ACGTTGGATGACTCGCATAACAGATGTTCC | ACGTTGGATGTAACCATTGCGCATTTCCAG |
| 2051649 | ACGTTGGATGACCTGCTGAAAACCAACACC | ACGTTGGATGGGAGAGGAGAACCCTGGAC |
| 2068770 | ACGTTGGATGCACTTCACGTACTTCACTGG | ACGTTGGATGAGTTTGCTCCTATGTGGCTC |
| 2072019 | ACGTTGGATGAGGTCCACAGAAGATGTTAG | ACGTTGGATGCACAACGGTCATTTGAACAC |
| 2072020 | ACGTTGGATGAAGTCCTGTTGTCTGCAAGG | ACGTTGGATGCAGTTGTCTTAGCACACAGG |
| 2072022 | ACGTTGGATGCAAAGAAGAAAGATGTAGTGG | ACGTTGGATGCGAAATCTGGTCCTATGAAG |
| 2072026 | ACGTTGGATGTCCTATCACCATCACACTAC | ACGTTGGATGCAGCATCAAACAGAATAGGC |
| 2072029 | ACGTTGGATGTCCTTTGCAGACTGATACTCC | ACGTTGGATGTCACTCACTCCTTGCTAAGC |
| 2157544 | ACGTTGGATGCATATGTAGTAGGAATGAGGG | ACGTTGGATGTGAGGCTCAAAGGGATTAGG |
| 2157545 | ACGTTGGATGTCTGGTCAACCACATAGATC | ACGTTGGATGTGTTCTACTGCAGCTCCAAG |
| 2157546 | ACGTTGGATGTCCACTTGTACAGAATGGAG | ACGTTGGATGCATTTACTCAGTGCCAGGTC |
| 2157547 | ACGTTGGATGCCATACCATTTACTTCTGCC | ACGTTGGATGAGGCAAGTACACATACAATG |
| 2157550 | ACGTTGGATGCACACACACATTTTAATTGCC | ACGTTGGATGTTGTTCAGAATTACATGATG |
| 2213838 | ACGTTGGATGAAAGGACTTGAGGGTGATTG | ACGTTGGATGGCAACAAACAGTGTTCCAGC |
| 2213839 | ACGTTGGATGAGTCACAGTTCAGTCCCAAC | ACGTTGGATGGGGCAATTTTCTAGTCCAGC |
| 2213840 | ACGTTGGATGCTTTCGCACAAGGCTCTATC | ACGTTGGATGAAGTCTGTGTTTAAGCCCCC |
| 2227237 | ACGTTGGATGGATGTCTCTAAGTTGAAATGC | ACGTTGGATGATATCAATCACCCTCAAGTC |
| 2237238 | ACGTTGGATGCAGAGGCTGAAGGAACATAC | ACGTTGGATGTCTGTAATCCCAGGACCCTA |
| 2237241 | ACGTTGGATGTCAGCAGGGCTCTATCTAAG | ACGTTGGATGCCAAGCAGTATTGCTAATGG |
| 2237242 | ACGTTGGATGCCTCACCATTGTGTTTAGGC | ACGTTGGATGTGACTATTTCCGCTTGGCTC |
| 2237244 | ACGTTGGATGGAGAAAAATAGACTCGGCCC | ACGTTGGATGCACAGACGCAGGATTTGGAT |
| 2237247 | ACGTTGGATGCTGCTTCTCCAGTAATGTTG | ACGTTGGATGGTGTTAGTAACACTGATGCC |
| 2237248 | ACGTTGGATGCCCTCCCCAGATATCATTAG | ACGTTGGATGCATATCCACAGCCTAATCAC |
| 2237249 | ACGTTGGATGAAATGCTTCCTACTGCAATC | ACGTTGGATGTGGAGAGTTGTGGTTGATGG |
| 2239849 | ACGTTGGATGGACATCAGATCAGACAGCAC | ACGTTGGATGACTTTCTGGCATTGACTGGG |
| 2239850 | ACGTTGGATGGCCCAGGAAAAATTAATTCAC | ACGTTGGATGGCAGTACGGATTAGCATGAG |
| 2269646 | ACGTTGGATGTCACCTCACTTTTGAAGAGC | ACGTTGGATGTCTGGTTAGGCTTCAGTTAG |
| 2277084 | ACGTTGGATGGAGGGTAAAAATGACAGCAG | ACGTTGGATGTTTTGCTTGGTGTTTAGCAG |
| 2282853 | ACGTTGGATGTCTTGACCTTCCTGGTTTTC | ACGTTGGATGTATCAGAGCTAGAAGAAACC |
| 2282854 | ACGTTGGATGTAGCCAGTGGTTAAGAAAGC | ACGTTGGATGTTCTCATGTTGGGGAGACAC |
| 2301512 | ACGTTGGATGATCTGAGTGGTTTCAGGAGG | ACGTTGGATGACCTGTTGGAACACATGAAG |
| 2301513 | ACGTTGGATGCTGGCGGGTAGTGTCTTCAT | ACGTTGGATGCTTTGAAATTGTTCTTGTCC |
| 2345808 | ACGTTGGATGTTCTGGGATTTAAAGGAGGC | ACGTTGGATGCCAAACATTTCTTGTTGGAC |
| 3734286 | ACGTTGGATGACCTTACACTCCAGTGAATC | ACGTTGGATGGCCGTTAAGCAACTACAAGC |
| 3734287 | ACGTTGGATGCAGTGGAGAAGATGAAACCC | ACGTTGGATGGCCACTTCTGGTCTATGTTG |
| 3752577 | ACGTTGGATGCATGGCTGAGGTTACTTAGG | ACGTTGGATGGAATGCGTCAGGGATTTATG |
| 3777925 | ACGTTGGATGCTACAAGTCTAACAGTCAGAG | ACGTTGGATGTTTACAGAGCAAGGTCTGAGG |
| 3777926 | ACGTTGGATGGTGAGTACCATCCCTTTTGC | ACGTTGGATGCTGTTAAACTGCCTCAGACC |
| 3777927 | ACGTTGGATGAAACGAATGCTTGAGAGCAG | ACGTTGGATGGTCCTGATTTATGAGCTCCC |
| 3777928 | ACGTTGGATGTTCACACGTAGACCCTGTTG | ACGTTGGATGTCAGGAGTTGAGCAAGCTAG |
| 3777929 | ACGTTGGATGGCTGTCTTTGGGATTAAAT | ACGTTGGATGTTCATAAAGAAGTGGAGAGC |
| 3777932 | ACGTTGGATGTCCCAGACCTTAAGATTCCC | ACGTTGGATGTATTAGGCTCTTTGGCCGAC |
| 3777934 | ACGTTGGATGCAAGATCCAGATGGTGAGGG | ACGTTGGATGCAAGGTCAGAGTGTCACTGG |
| 3777941 | ACGTTGGATGGCTTCCTGAGATTATATTGAC | ACGTTGGATGCTCCATTCCAAATTCCTTTC |
| 3777942 | ACGTTGGATGTCATGACAAATCATGACTAG | ACGTTGGATGTCAGATACAAGTGAAGGTAG |
| 3798357 | ACGTTGGATGTCCCAATTCAGGAAATGGTG | ACGTTGGATGTGCTTGGTATACCATGCCTG |
| 3798359 | ACGTTGGATGTTCCTCAGCACACAGCCCCA | ACGTTGGATGATGAACCTTACACAGGCCAG |
| 3822941 | ACGTTGGATGTATAATAAACTGATAGTTGC | ACGTTGGATGCTCTGTACTTAGGACACACG |
| 3948760 | ACGTTGGATGTCCACTTGTACAGAATGGAG | ACGTTGGATGTCCCACACTCAAAACTTTGC |

[0294] TABLE 16

| dbSNP | Extend | Term |
|---|---|---|
| rs# | Primer | Mix |
| LAMA4_SNP5 | ATTGCTTTACGCAACACCAC | ACG |
| LAMA4_SNP6 | AGATGGAGAGAATGCCAC | CGT |
| LAMA4_SNP4 | GCAAGTGGGCATTCGACCA | CGT |
| LAMA4_SNP1 | CTTCAAGATGCACAGGGCCAC | ACG |
| 1050348 | CACTTGACCAGGCCCTTAAC | ACG |
| LAMA4_SNP2 | GGCCCGCCTGCATCTGTG | ACG |
| 744006 | CTTTCTCTCTTTCCAGG | ACG |
| 763247 | CTTTTAATCCCCCACACT | ACT |
| 764071 | AGAACATATATGTTGCATTTTTTT | ACT |
| 764587 | GAAGGCCTTTGCCTGTTA | ACT |
| 969138 | AGGAAGAGAATCTGATAGCC | ACT |
| 971402 | AGTTTCTCCCACTTACC | ACT |
| 971405 | AGGGTAACAGAATGATTAAAA | CGT |
| 1050348 | TTCGGCATCCCTGACAT | ACT |
| 1050349 | CGTATCTTCAAGATGCACA | ACT |
| 1158747 | GCAAGTGGGCATTCGACCA | CGT |
| 1418499 | GGGCAGAATTACTGAATCAAG | ACT |
| 1480646 | CAGCAGACTCTGATGTGGC | ACG |
| 1894681 | GGGAGCATCTTTTGAGC | ACT |
| 2032565 | CAACAGGAAAAATACATCCA | CGT |
| 2032566 | CAACCCTAGGAAAACATTT | ACT |
| 2032567 | TTCTATGATTTTGGATTCAGC | ACT |
| 2032568 | ACATACTCTGAGGAGAGAAAG | ACT |
| 2051649 | GAACCCTGGACAAGAAT | ACT |
| 2068770 | ATGTGGCTCAAACATCCGAA | ACT |
| 2072019 | TTTGAACACTACAGTTTCTGTTAT | ACT |
| 2072020 | AAACAATCCATTTAACATACCTA | ACG |
| 2072022 | GCAAATGAATTCTGGGA | ACT |
| 2072026 | TGAAAGTCTTTGAGGTGTT | ACG |
| 2072029 | CCTGGCAATGATCAACCCCC | ACT |
| 2157544 | CTAAATATTAGCAGACTGAAATAC | ACT |
| 2157545 | GCTGGCATAAATGAAATTG | ACG |
| 2157546 | GTGCCAGGTCCCACACT | ACT |
| 2157547 | GTACACATACAATGATTTTACTC | ACT |
| 2157550 | TTACATGATGAATATTATGGAAGT | ACT |
| 2213838 | TTCCAGCATGATTCTAAGACA | ACT |
| 2213839 | CAACTTGAGATACAGTAAAAATT | ACG |
| 2213840 | TGAAATGAATTCTCCAATAGAC | ACG |
| 2227237 | ACCCTCAAGTCCTTTTG | ACG |
| 2237238 | TCCCAGGACCCTAAAAAAGT | CGT |
| 2237241 | CAGTATTGCTAATGGGTGTTC | ACT |
| 2237242 | TGTCTCTAGGGCACTACATATC | ACT |
| 2237244 | GAAATAATGCTTCAGGGG | ACT |
| 2237247 | ATGCCTTCTAATGCATTCATTTTA | ACG |
| 2237248 | CCTAATCACATAAACCAGGAA | ACG |
| 2237249 | GAAAACAAGAGAGGGAAG | ACT |
| 2239849 | TGTGACTCCTCATGCTAATC | ACG |
| 2239850 | CCAGTCAATGCCAGAAA | ACT |
| 2269646 | CAGTTAGACTGAAACGCACA | ACT |
| 2277084 | TGTGTCATTTAAATCCTTCA | ACT |
| 2282853 | GAGCTAGAAGAAACCTGAAAG | ACT |
| 2282854 | GTTGGTGTCCAAATGGCA | ACT |
| 2301512 | ACATGAAGACACTACCC | ACT |
| 2301513 | TGTTCTTGTCCAAAATTACCT | ACT |
| 2345808 | GACATTTAGGTTATTTCCAAATTT | ACT |
| 3734286 | CATCAGAGAGAATTGAAGT | ACT |
| 3734287 | GGAATTCAGGCATACAC | ACG |
| 3752577 | AGAAATAGATGGAGCCAAAAG | ACG |
| 3777925 | GGATGGGACTGAAACTC | ACT |
| 3777926 | CTCTGTAATTTTTCATGTATGATA | ACT |
| 3777927 | ATGAGCTCCCTTCACTC | ACG |
| 3777928 | TGAGCAAGCTAGAGAGTA | CGT |
| 3777929 | AAGTGGAGAGCATTTACAT | ACT |
| 3777932 | TTTGGCCGACTGAAATG | ACT |
| 3777934 | GGTCAGAGTGTCACTGGGCTACA | ACT |
| 3777941 | TCCCAAATTTCCTTTTCA | ACG |
| 3777942 | ACAAGTGAAGGTAGTATTGT | CGT |
| 3798357 | GCCTGGCATCTGCTAATC | ACT |
| 3798359 | GCAAAGGCAGAGACTAT | ACT |
| 3822941 | ACACACGATGTTTCTCCAG | ACG |
| 3948760 | ACAGTTTTATGAGACAGGTA | ACT |

Genetic Analysis and Allelotyping Results

[0295] Allelotyping results are shown for cases and controls in Table 17. The allele frequency for the A2 allele is noted in the fifth and sixth columns for breast cancer pools and control pools, respectively, where “AF” is allele frequency. The allele frequency for the Al allele can be easily calculated by subtracting the A2 allele frequency from 1 (A1 AF=1−A2 AF). For example, the SNP rs969138 has the following case and control allele frequencies: case A1 (C)=0.893; case A2 (G)=0.107; control A1 (C)=0.866; and control A2 (G)=0.134, where the nucleotide is provided in paranthesis. SNPs with blank allele frequencies were untyped.

TABLE 17

| dbSNP | Position in | Chromosome | A1/A2 | A2 Case | A2 Control | |
|---|---|---|---|---|---|---|
| rs# | | Position | Allele | AF | AF | p-Value |
| 969138 | 184 | 112446684 | C/G | 0.107 | 0.134 | 0.1800 |
| 1418499 | 506 | 112447006 | T/C | 0.474 | 0.545 | 0.0181 |
| 2157550 | 3981 | 112450481 | C/G | 0.238 | 0.294 | 0.0356 |
| 764587 | 7815 | 112454315 | A/G | 0.263 | 0.192 | 0.0054 |
| 3734287 | 7875 | 112454375 | G/A | 0.645 | 0.729 | 0.0032 |
| 2032565 | 10775 | 112457275 | T/A | 0.271 | 0.303 | 0.2393 |
| 2032566 | 10786 | 112457286 | T/C | 0.560 | 0.527 | 0.2791 |
| 1050349 | 11013 | 112457513 | G/C | 0.789 | 0.806 | 0.4918 |
| LAMA4_SNP1 | 11020 | 112457520 | C/T | 0.556 | 0.480 | 0.0109 |
| 2032568 | 11101 | 112457601 | A/G | 0.280 | 0.336 | 0.0429 |
| 2072019 | 14171 | 112460671 | A/G | 0.658 | 0.608 | 0.0830 |
| 2072020 | 14278 | 112460778 | G/A | 0.171 | 0.170 | 0.9646 |
| 1480646 | 16512 | 112463012 | G/A | 0.329 | 0.329 | 0.9962 |
| 2072026 | 16706 | 112463206 | C/T | 0.326 | 0.367 | 0.1525 |
| 763247 | 18442 | 112464942 | A/C | 0.293 | 0.360 | 0.0168 |
| 744006 | 20286 | 112466786 | C/T | 0.697 | 0.670 | 0.3444 |
| 3822941 | 21591 | 112468091 | G/A | 0.694 | 0.670 | 0.3923 |
| 3777942 | 22275 | 112468775 | A/T | 0.234 | 0.254 | 0.4484 |
| 3734286 | 25318 | 112471818 | C/G | 0.240 | 0.249 | 0.7505 |
| 3777941 | 27997 | 112474497 | C/T | 0.590 | 0.573 | 0.5688 |
| 2277084 | 29840 | 112476340 | A/G | 0.170 | 0.193 | 0.3128 |
| 3798359 | 31088 | 112477588 | C/G | 0.189 | 0.194 | 0.8418 |
| 3798357 | 31258 | 112477758 | T/C | 0.607 | 0.589 | 0.5393 |
| 2227237 | 32367 | 112478867 | G/A | 0.699 | 0.678 | 0.4600 |
| 2213838 | 32427 | 112478927 | T/C | 0.619 | 0.606 | 0.6603 |
| 3752577 | 33671 | 112480171 | G/A | 0.866 | 0.856 | 0.6307 |
| LAMA4_SNP2 | 38796 | 112485296 | C/T | 0.480 | 0.441 | 0.1869 |
| 971402 | 41530 | 112488030 | A/G | 0.406 | 0.397 | 0.7632 |
| 971405 | 41874 | 112488374 | A/T | 0.396 | 0.370 | 0.3662 |
| 2051649 | 44161 | 112490661 | A/G | 0.620 | 0.596 | 0.4216 |
| 1050348 | 47502 | 112494002 | C/T | 0.437 | 0.518 | 0.0071 |
| 2157544 | 51089 | 112497589 | T/G | 0.344 | 0.396 | 0.0695 |
| 2157545 | 51205 | 112497705 | C/T | 0.143 | 0.116 | 0.1789 |
| 2213839 | 53645 | 112500145 | G/A | 0.329 | 0.387 | 0.0415 |
| LAMA4_SNP4 | 54280 | 112500780 | G/T | 0.339 | 0.392 | 0.0645 |
| 3777934 | 57610 | 112504110 | A/G | 0.065 | 0.068 | 0.8646 |
| 1894681 | 57740 | 112504240 | A/G | 0.433 | 0.382 | 0.0840 |
| 2301512 | 60812 | 112507312 | G/C | 0.089 | 0.092 | 0.8857 |
| 2301513 | 60837 | 112507337 | T/C | 0.688 | 0.741 | 0.0514 |
| 2072029 | 64448 | 112510948 | T/C | 0.765 | 0.782 | 0.5146 |
| 764071 | 65249 | 112511749 | T/G | 0.431 | 0.502 | 0.0175 |
| 2269646 | 65482 | 112511982 | T/C | 0.438 | 0.379 | 0.0458 |
| LAMA4_SNP5 | 66535 | 112513035 | C/T | 0.099 | 0.071 | 0.1061 |
| 2072022 | 66789 | 112513289 | T/C | 0.956 | 0.954 | 0.9004 |
| LAMA4_SNP6 | 67214 | 112513714 | C/A | 0.410 | 0.452 | 0.1649 |
| 2237238 | 68347 | 112514847 | C/A | 0.111 | 0.099 | 0.5343 |
| 3777932 | 69060 | 112515560 | T/C | 0.080 | 0.073 | 0.6848 |
| 3777929 | 70100 | 112516600 | A/G | 0.311 | 0.364 | 0.0656 |
| 3777928 | 70215 | 112516715 | G/T | 0.414 | 0.364 | 0.0861 |
| 2157546 | 73687 | 112520187 | C/G | 0.331 | 0.415 | 0.0045 |
| 3948760 | 73732 | 112520232 | A/G | 0.187 | 0.269 | 0.0015 |
| 2237241 | 74183 | 112520683 | T/C | 0.384 | 0.447 | 0.0360 |
| 2237242 | 74813 | 112521313 | A/G | 0.434 | 0.391 | 0.1478 |
| 2237244 | 78136 | 112524636 | T/C | 0.492 | 0.515 | 0.4374 |
| 3777927 | 79540 | 112526040 | C/T | 0.110 | 0.042 | 0.0001 |
| 3777926 | 79655 | 112526155 | A/G | 0.854 | 0.858 | 0.8519 |
| 3777925 | 79731 | 112526231 | T/C | 0.774 | 0.771 | 0.9216 |
| 2239849 | 82111 | 112528611 | G/A | 0.734 | 0.771 | 0.1596 |
| 2239850 | 82155 | 112528655 | T/G | 0.851 | 0.936 | 0.0000 |
| 2237247 | 83479 | 112529979 | G/A | 0.097 | 0.093 | 0.8578 |
| 2282853 | 84511 | 112531011 | G/C | 0.775 | 0.783 | 0.7522 |
| 2282854 | 85290 | 112531790 | T/C | 0.078 | 0.014 | 0.0000 |
| 2213840 | 90620 | 112537120 | G/A | 0.738 | 0.806 | 0.0077 |
| 2068770 | 91127 | 112537627 | A/G | 0.332 | 0.277 | 0.0479 |
| 2237248 | 92095 | 112538595 | G/A | 0.212 | 0.153 | 0.0111 |
| 2237249 | 92679 | 112539179 | A/G | 0.339 | 0.270 | 0.0128 |
| 2345808 | 94839 | 112541339 | T/G | 0.182 | 0.114 | 0.0019 |
| 2157547 | 95220 | 112541720 | G/C | 0.176 | 0.128 | 0.0258 |

[0296] FIG. 15 shows the proximal SNPs in and around the LAMA4 region. The position of each SNP on the chromosome is presented on the x-axis. The y-axis gives the negative logarithm (base 10) of the p-value comparing the estimated allele in the case group to that of the control group. The minor allele frequency of the control group for each SNP designated by an X or other symbol on the graphs in FIG. 15 can be determined by consulting Table 17. By proceeding down the Table from top to bottom and across the graphs from left to right the allele frequency associated with each symbol shown can be determined.

[0297] To aid the interpretation, multiple lines have been added to the graph. The broken horizontal lines are drawn at two common significance levels, 0.05 and 0.01. The vertical broken lines are drawn every 20 kb to assist in the interpretation of distances between SNPs. Two other lines are drawn to expose linear trends in the association of SNPs to the disease. The light gray line (or generally bottom-most curve) is a nonlinear smoother through the data points on the graph using a local polynomial regression method (W. S. Cleveland, E. Grosse and W. M. Shyu (1992) Local regression models. Chapter 8 of Statistical Models in S eds J. M. Chambers and T. J. Hastie, Wadsworth & Brooks/Cole.). The black line (or generally top-most curve, e.g., see peak in left-most graph just to the left of position 92150000) provides a local test for excess statistical significance to identify regions of association. This was created by use of a 10 kb sliding window with 1 kb step sizes. Within each window, a chi-square goodness of fit test was applied to compare the proportion of SNPs that were significant at a test wise level of 0.01, to the proportion that would be expected by chance alone (0.05 for the methods used here). Resulting p-values that were less than 10⁻⁸ were truncated at that value.

[0298] Finally, the gene or genes present in the loci region of the proximal SNPs as annotated by Locus Link (http address: www.ncbi.nlm.nih.gov/LocusLink/) are provided on the graph. The exons and introns of the genes in the covered region are plotted below each graph at the appropriate chromosomal positions. The gene boundary is indicated by the broken horizontal line. The exon positions are shown as thick, unbroken bars. An arrow is place at the 3′ end of each gene to show the direction of transcription.

### Example 5

### CHGB/C20orf154 Proximal SNPs

[0299] It has been discovered that a polymorphic variation (rs454422) in a gene region that includes CHGB and C20orf154 is associated with the occurrence of breast cancer (see Examples 1 and 2). Subsequently, SNPs proximal to the incident SNP (rs454422) were identified and allelotyped in breast cancer sample sets and control sample sets as described in Examples 1 and 2. A total of ninety-eight allelic variants located within or nearby the CHGB/C20orf154 region were identified and allelotyped. The polymorphic variants are set forth in Table 18. The chromosome position provided in column four of Table 18 is based on Genome “Build 33” of NCBI's GenBank.

TABLE 18

| dbSNP | | Position in | Chromosome | Allele |
|---|---|---|---|---|
| rs# | Chromosome | | Position | Variants |
| 2300427 | 20 | 186 | 5842586 | T/G |
| 571039 | 20 | 1332 | 5843732 | G/T |
| 236143 | 20 | 1893 | 5844293 | T/C |
| 236145 | 20 | 2786 | 5845186 | C/G |
| 236146 | 20 | 2962 | 5845362 | A/G |
| 446658 | 20 | 3377 | 5845777 | A/C |
| 500277 | 20 | 5522 | 5847922 | A/G |
| 2268339 | 20 | 5621 | 5848021 | A/G |
| 454328 | 20 | 5889 | 5848289 | G/A |
| 236148 | 20 | 7531 | 5849931 | T/C |
| 236149 | 20 | 8268 | 5850668 | T/C |
| 910122 | 20 | 8923 | 5851323 | G/A |
| 881118 | 20 | 8988 | 5851388 | A/C |
| 236151 | 20 | 9117 | 5851517 | G/A |
| 236152 | 20 | 9448 | 5851848 | C/G |
| CHGB_SNP1 | 20 | 9494 | 5851894 | G/A |
| 742710 | 20 | 9628 | 5852028 | G/A |
| 742711 | 20 | 9640 | 5852040 | T/C |
| 236154 | 20 | 11072 | 5853472 | T/G |
| 236155 | 20 | 11150 | 5853550 | A/G |
| 54144 | 20 | 11379 | 5853779 | C/A |
| 540717 | 20 | 11692 | 5854092 | G/A |
| 236158 | 20 | 12056 | 5854456 | T/C |
| 236159 | 20 | 12104 | 5854504 | G/A |
| 446614 | 20 | 14160 | 5856560 | T/C |
| 1343180 | 20 | 14836 | 5857236 | A/G |
| 1039542 | 20 | 14980 | 5857380 | A/C |
| 400735 | 20 | 15165 | 5857565 | A/G |
| 1039543 | 20 | 15315 | 5857715 | A/G |
| 440005 | 20 | 15624 | 5858024 | A/C |
| 394604 | 20 | 15796 | 5858196 | C/T |
| 546106 | 20 | 15939 | 5858339 | T/C |
| 452749 | 20 | 16581 | 5858981 | C/T |
| 364652 | 20 | 17045 | 5859445 | T/C |
| 403727 | 20 | 18501 | 5860901 | A/G |
| 236160 | 20 | 21800 | 5864200 | A/G |
| 236161 | 20 | 21966 | 5864366 | A/G |
| 236162 | 20 | 22134 | 5864534 | A/G |
| 236163 | 20 | 22181 | 5864581 | A/G |
| 236164 | 20 | 23028 | 5865428 | A/G |
| 236165 | 20 | 23312 | 5865712 | A/G |
| 236166 | 20 | 23573 | 5865973 | T/A |
| 236167 | 20 | 23858 | 5866258 | A/G |
| 183535 | 20 | 23888 | 5866288 | G/A |
| 236168 | 20 | 23990 | 5866390 | T/C |
| 236169 | 20 | 24073 | 5866473 | A/G |
| 236171 | 20 | 25330 | 5867730 | G/A |
| 236173 | 20 | 26473 | 5868873 | T/C |
| 236175 | 20 | 27958 | 5870358 | C/T |
| 236176 | 20 | 28421 | 5870821 | A/G |
| 451571 | 20 | 28804 | 5871204 | C/T |
| 236177 | 20 | 29322 | 5871722 | C/A |
| 1005517 | 20 | 30819 | 5873219 | G/C |
| 236179 | 20 | 31956 | 5874356 | G/A |
| 236180 | 20 | 32592 | 5874992 | G/A |
| 236181 | 20 | 32818 | 5875218 | G/C |
| 236182 | 20 | 32880 | 5875280 | G/T |
| 236183 | 20 | 33244 | 5875644 | G/C |
| 236184 | 20 | 33845 | 5876245 | A/G |
| 236185 | 20 | 34272 | 5876672 | G/A |
| 236187 | 20 | 34931 | 5877331 | T/C |
| 1394095 | 20 | 36870 | 5879270 | T/G |
| 236189 | 20 | 37790 | 5880190 | T/C |
| 236110 | 20 | 38708 | 5881108 | T/G |
| 236111 | 20 | 39135 | 5881535 | T/C |
| 236112 | 20 | 39919 | 5882319 | A/G |
| 236113 | 20 | 40166 | 5882566 | C/T |
| 236114 | 20 | 40985 | 5883385 | A/G |
| 236115 | 20 | 41049 | 5883449 | A/G |
| 236116 | 20 | 41935 | 5884335 | C/T |
| 236117 | 20 | 42775 | 5885175 | A/C |
| 236118 | 20 | 43807 | 5886207 | T/C |
| 236119 | 20 | 44254 | 5886654 | A/G |
| 3761873 | 20 | 44814 | 5887214 | A/C |
| 236120 | 20 | 45249 | 5887649 | T/G |
| 451417 | 20 | 47599 | 5889999 | C/A |
| 379418 | 20 | 47807 | 5890207 | G/A |
| 2326680 | 20 | 48555 | 5890955 | A/C |
| 409035 | 20 | 49249 | 5891649 | G/A |
| 454422 | 20 | 49293 | 5891693 | A/C |
| 236102 | 20 | 57566 | 5899966 | A/C |
| 236103 | 20 | 63587 | 5905987 | T/C |
| 236104 | 20 | 64560 | 5906960 | C/T |
| 236105 | 20 | 65432 | 5907832 | C/G |
| 236106 | 20 | 66291 | 5908691 | T/C |
| 236107 | 20 | 71331 | 5913731 | A/T |
| 180477 | 20 | 73344 | 5915744 | A/T |
| 236108 | 20 | 74159 | 5916559 | C/T |
| 236109 | 20 | 74564 | 5916964 | T/C |
| 236121 | 20 | 78194 | 5920594 | A/G |
| 236122 | 20 | 79128 | 5921528 | T/C |
| 236123 | 20 | 79393 | 5921793 | C/T |
| 236124 | 20 | 81579 | 5923979 | G/A |
| 236125 | 20 | 82574 | 5924974 | C/T |
| 2876003 | 20 | 85309 | 5927709 | G/C |
| CHGB_SNP2 | 20 | 87076 | 5929476 | A/G |
| 2423131 | 20 | 87844 | 5930244 | C/A |
| 2206817 | 20 | 90241 | 5932641 | T/C |

Assay for Verifying and Allelotyping SNPs

[0300] The methods used to verify and allelotype the sixty-three proximal SNPs of Table 18 are the same methods described in Examples 1 and 2 herein. The PCR primers and extend primers used in these assays are provided in Table 19 and Table 20, respectively.

TABLE 19

| | | |
|---|---|---|
| dbSNP | Forward | Reverse |
| rs# | PCR primer | PCR primer |

| | | |
|---|---|---|
| 5414 | AACGTTGGATGAGCAGCCATCACATGATCTG | ACGTTGGATGCCAATTGTGTCAAACATTTAATGAA |
| 183535 | ACGTTGGATGTGGTCTAAGTCCTGCACAAG | ACGTTGGATGGACAGAAAGAGTGTGCAGTC |
| 236104 | ACGTTGGATGCTCCCTGAACTTCCCATTTC | ACGTTGGATGCAGGGAGCTTACTACAAAGC |
| 236105 | ACGTTGGATGGGTAGCCACATTTGACACAG | ACGTTGGATGAAGTGGCCTGGAAACCAATG |
| 236113 | ACGTTGGATGGCTAATACATCCTAAAGGAAC ACGTTGGATGCTTTATTGGAAATCTGTTCG | |
| 236119 | ACGTTGGATGTTTCTTCTTGTCTCACAGGC | ACGTTGGATGCTGTAGATTTTCCTTTTGGC |
| 236120 | ACGTTGGATGCAGGATAATGATCATCCCTG | ACGTTGGATGACTGGCACAATTAGTGTCTG |
| 236122 | ACGTTGGATGTAGCTATCCCATTGTTGAGG | ACGTTGGATGGCTAAAGTCTGAAAACACTAG |
| 236143 | ACGTTGGATGCCTACCCCAAATAGGTAAAG | ACGTTGGATGAGGAAGTAAGTTTTGGGAGG |
| 236145 | ACGTTGGATGAGAATGTGAGCAAGGGATGC | ACGTTGGATGAATGGCACAGCTATCCTCAG |
| 236146 | ACGTTGGATGGTAAATCTGTATCTCCGCCC | ACGTTGGATGGACTTGATTACGTGACCTGG |
| 236149 | ACGTTGGATGCCAATGATCAAACTGAAATCG ACGTTGGATGGGACTGGATTAGATGAATTC | |
| 236160 | ACGTTGGATGCACCCACAGCTATCTGAGTT | ACGTTGGATGTCCAAAAGGAGTGGGTAGAG |
| 236162 | ACGTTGGATGAATGGAGTGTTTGCATGTTG | ACGTTGGATGCATGGATTTTTAGGACATGCG |
| 236163 | ACGTTGGATGGCCAAAAATAGCCTTTTCTC | ACGTTGGATGAAACAACATGCAAACACTCC |
| 236164 | ACGTTGGATGTTGCAAGCTGGTGTCACACA | ACGTTGGATGAGACCAGCCACTACTGATTC |
| 236166 | ACGTTGGATGCTCCTGTCATAGAATAGGCC | ACGTTGGATGGCATAGCACATGCTATTTGG |
| 236167 | ACGTTGGATGATCAAAGTCTTGTGCAGGAC | ACGTTGGATGGCACTTTAGGGACATTTTGAC |
| 236176 | ACGTTGGATGGCATAGATAGCTTAATCATGG | ACGTTGGATGAAACCAATAGAAGCAGGTTG |
| 236177 | ACGTTGGATGCATTTGAGGATCGGAGTGAG | ACGTTGGATGCCCTGTGTCTGCAAATTTGG |
| 236180 | ACGTTGGATGCCTAGCACTTGGGAATTAGG | ACGTTGGATGGATGCGTGAAATAGATGCTC |
| 236182 | ACGTTGGATGCTCTCTAGTTCCTTTGTTGC | ACGTTGGATGATTTCAAAAGTGGTCTCCAC |
| 236183 | ACGTTGGATGTAAAAGAGAAATCCCACAGG | ACGTTGGATGCTCAGCAGATGTTAGTTTTC |
| 236184 | ACGTTGGATGCTAGGGACCCAGCAAATAAC | ACGTTGGATGACCATCTGAGGGAAATCCTG |
| 379418 | ACGTTGGATGTCTGGCCTCTAAGCTAAAGG | ACGTTGGATGCAGTGGTGTTGATAGATGGG |
| 400735 | ACGTTGGATGACCTTCTCAGGTTCACGTTC | ACGTTTGGATGAAGGGCACCATGCCATTAAC |
| 409035 | ACGTTGGATGTGCTATGGGTATGCAAGGTG | ACGTTGGATGGGTTGTTGAAGGAGCGAGAG |
| 440005 | ACGTTGGATGATGGCTCTAAAAAGCTGTCC | ACGTTTGGATGCAGCCTTCTTCCTGATACAG |
| 446614 | ACGTTGGATGTAAAGCCCAGGGCTAAAGAC | ACGTTGGATGAGAAGATGGCCAGAAAGGAG |
| 451417 | ACGTTGGATGCCAGAGTCATCGTTATCACC | ACGTTGGATGCCTCACTAAGGATTCAACCC |
| 454422 | ACGTTGGATGCAGCTTTTGAGGCACTTTCC | ACGTTGGATGAGCACCTTGCATACCCATAG |
| 500277 | ACGTTGGATGAGTTTCCCTACGTCTCTCTC | ACGTTGGATGAGTAACTCTAGCCTCTGCTC |
| 540717 | ACGTTGGATGCATCCAAAACCCAACAAATCC | ACGTTGGATGAGAGAGGTGTGTGACTTTTC |
| 546106 | ACGTTGGATGTTATAGCACTGATGGGCTCC | ACGTTGGATGCTGTGACATACTTTTCCAGG |
| 571039 | ACGTTGGATGATTCCTGTAGCAGGCAACTG | ACGTTGGATGGCTAGCTCTACTCTCTTCTC |
| 1039542 | ACGTTGGATGTGAGGTTCTGTCTGAACACC | ACGTTGGATGTGGCTGCAATGGCTAACTTC |
| 1039543 | ACGTTGGATGATCTGACTCAGAAGAAGAGC | ACGTTTGGATGGGCATTAATGGAGGTTATGC |
| 1343180 | ACGTTGGATGAGATGGCAACAGCAACACAG | ACGTTGGATGCCAACAGCAGCTTCACAATC |
| CHGB_SNP2 | ACGTTGGATGAAATGGTATGTTTGTGTTTCC ACGTTGGATGTAATTTTTCCCCCCCAAATC | |
| rs384578 | ACGTTGGATGAAATGGTATGTTTGTGTTCC | ACGTTGGATGTAATTTTTCCCCCCCAAATC |
| rs742710 | ACGTTGGATGAGAAAGTGAGGAAGAGAGGG | ACGTTGGATGATGAAATAGGCACGTGGCTC |
| rs742711 | ACGTTGGATGATGAAATAGGCACGTGGCTC | ACGTTGGATGAGAAAGTGAGGAAGAGAGGG |
| rs881118 | ACGTTGGATGTATAGCTGAAGCCTGCTTTC | ACGTTGGATGCAGTGAAGAGAAACACCTTG |
| rs910122 | ACGTTGGATGAAGGTGTTTCTCTTCACTGC | ACGTTGGATGGGAGGGAGAGAACTATCAAA |
| CHGB_SNP1 | ACGTTGGATGTCACTCTGAGGTCTTGGAGC | ACGTTGGATGTAAAGGGTTATCCAGGCGTC |
| 180477 | ACGTTGGATGGGAAGTAATTCTCTGGGCTG | ACGTTGGATGAAGTGATCCTCCCACCTCAG |
| 236102 | ACGTTGGATGCAGCCTGTTCTCTCTGAAAC | ACGTTGGATGGGATGCAAGAGGTTGTAGAG |
| 236103 | ACGTTGGATGCCTGTTTAAATCGTGGCTCC | ACGTTGGATGAAACATAAGGAAGCTGAGGC |
| 236106 | ACGTTGGATGCAAGCCTTTGCAGCTCTATC | ACGTTGGATGCCTCATAAGGGCCTTTGTAC |
| 236107 | ACGTTGGATGGAAGTTTACGTAAACTCTAG | ACGTTGGATGGTGTGTGGCTTATTGTAGAG |
| 236108 | ACGTTGGATGGTATTTACTGTTGAACCCAG | ACGTTGGATGATGTGGGTAAGTTGTGCACC |
| 236109 | ACGTTGGATGAGATTACAGGCACTAGCCAC | ACGTTGGATGTCTGGGCAACATGGTGAAAC |
| 236110 | ACGTTGGATGATCGATCCAATGTTGACTGC | ACGTTGGATGTTTTCAGAACAAACCCCACAG |
| 236111 | ACGTTGGATGTTCAGGAAGCAGCAACCATC | ACGTTGGATGTATGCTGTGACCTCTCCAAC |
| 236112 | ACGTTGGATGAACGAGGTCAGGAGATCAAG | ACGTTGGATGCACGCCCGGCTAATTTTTTC |
| 236114 | ACGTTGGATGGAACCAAGGAAGTCTGACTC | ACGTTTGGATGAAAGCTACCAGTCATGTGCC |
| 236115 | ACGTTGGATGATCAAAGTCCATACTGCAGG | ACGTTGGATGTATGATCGTAGGCACTGGAG |
| 236116 | ACGTTGGATGTGTTGTATTACCTGACCCTG | ACGTTGGATGAAGCAAACCACTGAGTGTCC |
| 236117 | ACGTTGGATGCAATGGTGTGATCTTGCCTC | ACGTTGGATGATTAGCCAAGTGTGGCAGTG |
| 236118 | ACGTTGGATGGGTTGAGTATCCCTAATCTG | ACGTTGGATGCTTTCAGTGTCGTGTCAGGG |
| 236121 | ACGTTGGATGCAAGCTATGTCACAGTTTAAG | ACGTTGGATGAGTCTTTTGCCCTTAATGTGG |
| 236123 | ACGTTGGATGATAATAAATTTAGACTTCAC | ACGTTGGATGAAAATACTGGTGCGGCCAGA |
| 236124 | ACGTTGGATGGAATTTTGTTTGGCTCACGG | ACGTTGGATGATTGCTGCTGGAAGCTTACC |
| 236125 | ACGTTGGATGCCATGCCTGAGTTATTTGC | ACGTTGGATGATGGAGAAAGTAGATAGTAG |
| 236148 | ACGTTGGATGTAAGCCCAAGTGCTGTTGAG | ACGTTGGATGCTCAGAAGTCTGATGTGTATC |
| 236151 | ACGTTGGATGTTGGCCTTTAGACTCCTGGG | ACGTTGGATGAGAAGACACATAGCCGAGAG |
| 236152 | ACGTTGGATGAATAAAGGGTTATCCAGGCG | ACGTTTGGATGTGGAGCCCTGTATTCTTCAC |
| 236154 | ACGTTGGATGTTCTGACAAGTTCCTGGCTG | ACGTTGGATGGCTGCATTAGTCAACCTACC |
| 236155 | ACGTTGGATGGGTAGGTTGACTAATGCAGC | ACGTTGGATGTGAGGTCCCGAACCAATTTC |
| 236158 | ACGTTGGATGAAACTCCTGACCTCGTGATC | ACGTTGGATGCTCCTTAAGAAGATAGAGGC |
| 236159 | ACGTTGGATGGTCTCAAACTCCTGACCTCG | ACGTTGGATGAAGAAGATAGAGGCAGCTGG |
| 236161 | ACGTTGGATGGATGTTGCCTCTAGGCTAGT | ACGTTGGATGCACCATCTGACCTGTGCTAC |
| 236165 | ACGTTGGATGAAAATTAGCCATGCGTGGTG | ACGTTGGATGTTCAAGCGGTTCTCCTGCCT |
| 236168 | ACGTTGGATGTCTATGTCTCCACTTGCATG | ACGTTGGATGACACATTTTGCACACACACAC |
| 236169 | ACGTTGGATGGTGACTAGAATTTTTGTGTAC ACGTTGGATGGTGTGTGCAAATGTGTATCC | |
| 236171 | ACGTTGGATGAACCTCCCACTTTGGCTTTC | ACGTTGGATGGGTCCATTTAAAGCCTGGTG |
| 236173 | ACGTTGGATGATCAACCTGCACCACCAATC | ACGTTGGATGGCTAAGATGGAAGTTGAAGTG |
| 236175 | ACGTTGGATGTTCTCCATCACTGCATCAAG | ACGTTGGATGGTTATAGCCTGTATCGCAGC |
| 236179 | ACGTTGGATGCTAAATAACAGGTTTGACTC | ACGTTGGATGGAACATTGAGAGTATCTTTAT |
| 236181 | ACGTTGGATGGTGAACATGTCTTTTCTGTAC ACGTTGGATGGGTAGAACCACTGTTTTTCG | |
| 236185 | ACGTTGGATGGGGTCACTTGAATTCAGGAG | ACGTTGGATGACTGCAACCACTGCCTCTTG |
| 236187 | ACGTTGGATGTAGTGAAACTCTGTCTCTGC | ACGTTGGATGACCTGCACCAACCTTTAACC |
| 236189 | ACGTTGGATGTGGATTTACAGAAAAACTGC | ACGTTGGATGCTGTGAGACACTAGGGATAC |
| 364652 | ACGTTGGATGTTTCTGCTGGGCTGTGATAG | ACGTTGGATGGGGAAATGCTCAGCATGTAC |
| 394604 | ACGTTGGATGTATTTTGGGATGGTGTGGGC | ACGTTGGATGGAACCAGGTCTTCCTTGATG |
| 403727 | ACGTTGGATGTCACTTGAACCCAGGAGATG | ACGTTGGATGGTTTTGAGACAGAGTTTCGC |
| 446658 | ACGTTGGATGTCACTGAGTTCAACTCCTTC | ACGTTGGATGGTTCCTGCTTTACCACTTCG |
| 451571 | ACGTTGGATGTTCTGGGTGGTTGCTCTCTG | ACGTTGGATGAAGTAATGGCACACTGGAGG |
| 452749 | ACGTTGGATGTCCTACTCCAGTATGACCTC | ACGTTGGATGGAAGTCCCAACCCCTAATAC |
| 454328 | ACGTTGGATGTGCAAACTGGTGCATCAGAG | ACGTTGGATGCCTGGTATTTTCATATCGCC |
| 742710 | ACGTTGGATGGGCACATGGATATGGTGAAG | ACGTTGGATGTGCCTCTGTGATGGTGTCCC |
| 742711 | ACGTTTGGATGGGCACATGGATATGGTGAAG | ACGTTGGATGAAATAGGCACGTGGCTCCCC |
| 881118 | ACGTTGGATGTATAGCTGAAGCCTGCTTTC | ACGTTGGATGTAGCAGTGAAGAGAAACACC |
| 910122 | ACGTTGGATGGTTTCTCTTCACTGCTATCT | ACGTTGGATGACACGCCATTCTGAGAAGAG |
| 1005517 | ACGTTGGATGTACTAATGTCAGTGGTAGAG | ACGTTGGATGTGAAGACACTGGCTGAAAAC |
| 1394095 | ACGTTGGATGTTCAGTGATCCAACTTCCGC | ACGTTGGATGCCAAACTCCTTGATTGGC |
| 2206817 | ACGTTGGATGGCAGAAACCCAGTGAAGTAG | ACGTTGGATGAAACCAGTTACTAACTGTAG |
| 2268339 | ACGTTGGATGATCCTGGAGATGTTATACCC | ACGTTGGATGCCTGGTGTTTAAGGCTCAAC |
| 2300427 | ACGTTTGGATGAGATTACAGGCATGAGCCAC | ACGTTGGATGAAGTTAAATAAGCTCTTCTG |
| 2326680 | ACGTTGGATGAGGCTAATTCCTTCTCCTGG | ACGTTGGATGTCGTGCAACATCACTGTGTC |
| 2423131 | ACGTTGGATGATGCCTGCCTTACGAGAATG | ACGTTGGATGTGTCACTAGAATATGTGAAC |
| 2876003 | ACGTTGGATGGCAAAGACTAAGAGTCTGTAG ACGTTGGATGCTGAGCCAGATTCTGACATT | |
| 3761873 | ACGTTGGATGCTGTCCCTCTTAGAGCAATG | ACGTTGGATGCTATGAGCCTTTGACACAGC |

[0301] TABLE 20

| dbSNP | Extend | Term |
|---|---|---|
| rs# | Primer | Mix |
| 54144 | CTGAAAGACACCATTTAT | CGT |
| 183535 | GTCCTGCACAAGACTTTGATA | ACG |
| 236104 | CCCATTTCATACCACCTATCA | ACG |
| 236105 | CTCCCTCCTCCTTGAGACC | ACT |
| 236113 | GATCATTCATGAAACAGATTCTA | ACG |
| 236119 | TGTTCTCAAGGAAAAAAGAAAAAA | ACT |
| 236120 | GATCATCCCTGGGAATGGTA | ACT |
| 236122 | GAGGCAGGGAATCAGCAATA | ACT |
| 236143 | ACCCCAAATAGGTAAAGATCTGT | ACT |
| 236145 | CTCCTGCACTGAGCTCCTAT | ACT |
| 236146 | TATCTCCGCCCTAAGAATACT | ACT |
| 236149 | GAAATATTAGAATTTAGAGGCAG | ACT |
| 236160 | GAGTTTTTATGAGAAAGGGCAA | ACT |
| 236162 | GTTGTTTTAAAGTGTTGGTTGTAA | ACT |
| 236163 | CAATACATAGTGAAGCTTTGGG | ACT |
| 236164 | CTGGTGTCACACACACATGTA | ACT |
| 236166 | GGAACATCTCAGAAAAAAAA | CGT |
| 236167 | CTTGTGCAGGACTTAGACCA | ACT |
| 236176 | ATAGGCTTTCTTGTGTATTTGCA | ACT |
| 236177 | AGTGAGGGGAAGCAGAGTC | CGT |
| 236180 | ACTTGGGAATTAGGTGGAGG | ACG |
| 236182 | GTTCAGAGATAATGCTGCTGATC | CGT |
| 236183 | GAAATCCCACAGGAACACAAT | ACT |
| 236184 | CCCAGCAAATAACAAGAATTGGCC | ACT |
| 379418 | CTTAAGCCAAGACAAACA | ACG |
| 400735 | TTCATCTTCCACCCTGGCC | ACT |
| 409035 | TGCTTTTGCTTGCCTCCCACA | ACG |
| 440005 | GCTGTCCTTITTACAAGGAAAT | ACT |
| 446614 | TAAAGACTGAAGCTTTCACAGT | ACT |
| 451417 | CGTTATCACCATTGGGCTTTA | CGT |
| 454422 | GATCCTTCTCACTTACTGTTC | ACT |
| 500277 | GATTATGCCCTGAGGTCTTTTG | ACT |
| 540717 | AACCCAACAAATCCTAGGGC | ACG |
| 546106 | GATGGGCTCCCCATATGAC | ACT |
| 571039 | TGTAGCAGGCAACTGAGCAGGAGA | CGT |
| 1039542 | GAACACCCTCCAGCACAAG | ACT |
| 1039543 | AGAAGAGCTTTCATCTGTGTG | ACT |
| 1343180 | CACAGCCCTCCATTACAGC | ACT |
| CHGB_SNP2 | GTATGTTTGTGTTCCATTTGCA | ACT |
| rs384578 | GTATGTTTGTGTTCCATTTGCA | ACT |
| rs742710 | GAAGAGAGGGGCCTTGAGC | ACG |
| rs742711 | TCCCCTGCCTCTGTGATGG | ACG |
| rs881118 | CTGAAGCCTGCTTTCTTTCAT | ACT |
| rs910122 | CTTCACTGCTATCTTCCCCT | ACG |
| CHGB_SNP1 | TCTTGGAGCCCTGTATTC | ACG |
| 180477 | GTGGCTCACGCCTATAA | CGT |
| 236102 | GTTCTCTCTGAAACCTGTTA | ACT |
| 236103 | CATGCACCAGCTGTGTG | ACT |
| 236106 | GAACATTCCAGGCAAAC | ACT |
| 236107 | GTTCTGGTAAAAAAAAAGTTTG | CGT |
| 236108 | CTGTTGAACCCAGAAATATC | ACT |
| 236109 | CACTAGCCACCACGCCC | ACT |
| 236110 | CAATGTTGACTGCATTGACT | ACT |
| 236111 | GTTTCTGAGGTTACCAGA | ACT |
| 236112 | ACCATCCTAGCTAACACG | ACT |
| 236114 | AATCACAAGTACCTCGAATAC | ACT |
| 236115 | AGGTAAGTGGCAGAACT | ACT |
| 236116 | TCAGGCAAGCACAGTACAAA | ACG |
| 236117 | GCCTCCCAAGTAGCTGG | ACT |
| 236118 | CCCTAATCTGAAAATCTGAAATCT | ACT |
| 236121 | AAGAATTTTCTTATTCAACTGTC | ACT |
| 236123 | CTTCACTAAATAAAAATGTGTCC | ACG |
| 236124 | GTTTTGGCTCACGGAATTAT | ACG |
| 236125 | TTTAACTCCTAGCTTTTAAAGA | ACG |
| 236148 | AAATGTGGCTGGTCCGATCTG | ACT |
| 236151 | ATTCTCCTGGCTCCCTG | ACG |
| 236152 | TTATCCAGGCGTCCAGG | ACT |
| 236154 | TGATGCCACTGGTCAGG | ACT |
| 236155 | AATTCCCCTTTGCACTCAT | ACT |
| 236158 | TTACAACTGTAAGCCACCGC | ACT |
| 236159 | CCTGACCTCGTGATCTG | ACG |
| 236161 | CTCTAGGCTAGTATTAATTTTTGT | ACT |
| 236165 | TAACGCCTGTAATCCCA | ACT |
| 236168 | ACTTGCATGTGTATGTATATATCT | ACT |
| 236169 | ATGTCTTTTCCCCCTCT | ACT |
| 236171 | AAGTGCTGGGATTACAGATA | ACG |
| 236173 | TTGCTCCCTCTCCCCTT | ACT |
| 236175 | CACTGCATCAAGATGGGCC | ACG |
| 236179 | CAGGTTGACTCAAAACTTTAA | ACG |
| 236181 | ATGTCTTTTCTGTACTGGATA | ACT |
| 236185 | TACTGAGGAGGCTGAGG | ACG |
| 236187 | AACTCTGTCTCTGCAAAAAAA | ACT |
| 236189 | CAGAAAAACTGCACAAAAA | ACT |
| 364652 | CTGTGATAGGAAAAAAGGAA | ACT |
| 394604 | CCAGCAGAGGCAAAAATAAGA | ACG |
| 403727 | TGCCACTGCACTCCAGCCT | ACT |
| 446658 | AGGAAAAGAGAGGCAAAC | ACT |
| 451571 | GCTGTCTTCATTCTCTTTGT | ACG |
| 452749 | CCTATTTTCAAGTCAGGT | ACG |
| 454328 | CCTAAACAGCAGTTTTAGTACAT | ACG |
| 742710 | AGAGAGGGGCCTTGAGC | ACG |
| 742711 | TGAGCCGGGAAAGGGAC | ACT |
| 881118 | TGAAGCCTGCTTTCTTTCAT | ACT |
| 910122 | CTTCACTGCTATCTTCCCCT | ACG |
| 1005517 | GGTAGAGAATGTAATAACAGT | ACT |
| 1394095 | ACGAGAGGGGCGGGGCG | ACT |
| 2206817 | TTAGAGCAGGGCAGGGG | ACT |
| 2268339 | CAGAATGCTGAGATGGC | ACT |
| 2300427 | CACCCGGCCGGGAAAAT | ACT |
| 2326680 | TGGAATTTGAGAAGGCCTG | ACT |
| 2423131 | GCCTTACGAGAATGTTTATTT | CGT |
| 2876003 | AGAGTCTGTAGTCCCAA | ACT |
| 3761873 | TGTATTTTCCATAGTAATTTGCTC | ACT |

Genetic Analysis and Allelotyping Results

[0302] Allelotyping results are shown for cases and controls in Table 21. The allele frequency for the A2 allele is noted in the fifth and sixth columns for breast cancer pools and control pools, respectively, where “AF” is allele frequency. The allele frequency for the Al allele can be easily calculated by subtracting the A2 allele frequency from 1 (A1 AF=1−A2 AF). For example, SNP rs2300427 has the following case and control allele frequencies: case A1 (T)=0.615; case A2 (G)=0.385; control A1 (T)=0.605; and control A2 (G)=0.395, where the nucleotide is provided in paranthesis. SNPs with blank allele frequencies were untyped (“not AT”).

TABLE 21

| dbSNP | Position | Chrom | Alleles | | A2 Control | |
|---|---|---|---|---|---|---|
| rs# | in FIG. 3 | Position | (A1/A2) | A2 Case AF | AF | p-Value |
| 2300427 | 186 | 5842586 | T/G | 0.395 | 0.385 | 0.7201 |
| 571039 | 1332 | 5843732 | G/T | 0.669 | 0.695 | 0.3506 |
| 236143 | 1893 | 5844293 | T/C | 0.499 | 0.545 | 0.1289 |
| 236145 | 2786 | 5845186 | C/G | 0.198 | 0.188 | 0.6666 |
| 236146 | 2962 | 5845362 | A/G | 0.549 | 0.601 | 0.0802 |
| 446658 | 3377 | 5845777 | A/C | 0.013 | 0.011 | 0.8118 |
| 500277 | 5522 | 5847922 | A/G | 0.217 | 0.214 | 0.8990 |
| 2268339 | 5621 | 5848021 | A/G | 0.931 | 0.888 | 0.0128 |
| 454328 | 5889 | 5848289 | G/A | 0.330 | 0.323 | 0.7912 |
| 236148 | 7531 | 5849931 | T/C | 0.463 | 0.459 | 0.9081 |
| 236149 | 8268 | 5850668 | T/C | 0.550 | 0.553 | 0.9289 |
| 910122 | 8923 | 5851323 | G/A | 0.373 | 0.337 | 0.2228 |
| 881118 | 8988 | 5851388 | A/C | 0.026 | 0.042 | 0.1278 |
| 236151 | 9117 | 5851517 | G/A | 0.295 | 0.272 | 0.3986 |
| 236152 | 9448 | 5851848 | C/G | 0.310 | 0.316 | 0.8329 |
| CHGB_SNP1 | 9494 | 5851894 | G/A | 0.497 | 0.485 | 0.6989 |
| 742710 | 9628 | 5852028 | G/A | 0.010 | 0.044 | 0.0007 |
| 742711 | 9640 | 5852040 | T/C | 0.326 | 0.266 | 0.0282 |
| 236154 | 11072 | 5853472 | T/G | 0.410 | 0.421 | 0.6955 |
| 236155 | 11150 | 5853550 | A/G | 0.454 | 0.445 | 0.7568 |
| 54144 | 11379 | 5853779 | C/A | 0.326 | 0.350 | 0.3946 |
| 540717 | 11692 | 5854092 | G/A | 0.492 | 0.495 | 0.9036 |
| 236158 | 12056 | 5854456 | T/C | 0.251 | 0.229 | 0.3815 |
| 236159 | 12104 | 5854504 | G/A | 0.404 | 0.385 | 0.5205 |
| 446614 | 14160 | 5856560 | T/C | 0.968 | 0.951 | 0.1381 |
| 1343180 | 14836 | 5857236 | A/G | 0.376 | 0.383 | 0.7937 |
| 1039542 | 14980 | 5857380 | A/C | 0.348 | 0.390 | 0.1491 |
| 400735 | 15165 | 5857565 | A/G | 0.286 | 0.272 | 0.5984 |
| 1039543 | 15315 | 5857715 | A/G | 0.356 | 0.318 | 0.1914 |
| 440005 | 15624 | 5858024 | A/C | 0.563 | 0.575 | 0.6852 |
| 394604 | 15796 | 5858196 | C/T | 0.297 | 0.277 | 0.4715 |
| 546106 | 15939 | 5858339 | T/C | 0.733 | 0.714 | 0.4816 |
| 452749 | 16581 | 5858981 | C/T | 0.297 | 0.262 | 0.1967 |
| 364652 | 17045 | 5859445 | T/C | 0.513 | 0.558 | 0.1426 |
| 403727 | 18501 | 5860901 | A/G | 0.743 | 0.748 | 0.8547 |
| 236160 | 21800 | 5864200 | A/G | 0.893 | 0.794 | 0.0000 |
| 236161 | 21966 | 5864366 | A/G | 0.121 | 0.187 | 0.0026 |
| 236162 | 22134 | 5864534 | A/G | 0.735 | 0.648 | 0.0021 |
| 236163 | 22181 | 5864581 | A/G | 0.042 | 0.096 | 0.0006 |
| 236164 | 23028 | 5865428 | A/G | 0.815 | 0.734 | 0.0018 |
| 236165 | 23312 | 5865712 | A/G | 0.888 | 0.892 | 0.8319 |
| 236166 | 23573 | 5865973 | T/A | 0.060 | 0.125 | 0.0004 |
| 236167 | 23858 | 5866258 | A/G | 0.695 | 0.675 | 0.4700 |
| 183535 | 23888 | 5866288 | G/A | 0.088 | 0.149 | 0.0020 |
| 236168 | 23990 | 5866390 | T/C | 0.302 | 0.303 | 0.9685 |
| 236169 | 24073 | 5866473 | A/G | 0.048 | 0.115 | 0.0001 |
| 236171 | 25330 | 5867730 | G/A | 0.749 | 0.739 | 0.6961 |
| 236173 | 26473 | 5868873 | T/C | 0.051 | 0.119 | 0.0002 |
| 236175 | 27958 | 5870358 | C/T | 0.172 | 0.289 | 0.0000 |
| 236176 | 28421 | 5870821 | A/G | 0.056 | 0.143 | 0.0000 |
| 451571 | 28804 | 5871204 | C/T | 0.954 | 0.924 | 0.0378 |
| 236177 | 29322 | 5871722 | C/A | 0.072 | 0.125 | 0.0040 |
| 1005517 | 30819 | 5873219 | G/C | 0.970 | 0.934 | 0.0051 |
| 236179 | 31956 | 5874356 | G/A | 0.056 | 0.108 | 0.0021 |
| 236180 | 32592 | 5874992 | G/A | 0.073 | 0.124 | 0.0047 |
| 236181 | 32818 | 5875218 | G/C | 0.908 | 0.807 | 0.0000 |
| 236182 | 32880 | 5875280 | G/T | 0.914 | 0.844 | 0.0006 |
| 236183 | 33244 | 5875644 | G/C | 0.870 | 0.771 | 0.0001 |
| 236184 | 33845 | 5876245 | A/G | 0.059 | 0.120 | 0.0006 |
| 236185 | 34272 | 5876672 | G/A | 0.028 | 0.041 | 0.2547 |
| 236187 | 34931 | 5877331 | T/C | 0.048 | 0.088 | 0.0090 |
| 1394095 | 36870 | 5879270 | T/G | 0.880 | 0.884 | 0.8136 |
| 236189 | 37790 | 5880190 | T/C | 0.105 | 0.160 | 0.0077 |
| 236110 | 38708 | 5881108 | T/G | 0.875 | 0.799 | 0.0009 |
| 236111 | 39135 | 5881535 | T/C | 0.045 | 0.080 | 0.0161 |
| 236112 | 39919 | 5882319 | A/G | 0.852 | 0.854 | 0.9265 |
| 236113 | 40166 | 5882566 | C/T | 0.869 | 0.790 | 0.0007 |
| 236114 | 40985 | 5883385 | A/G | 0.345 | 0.347 | 0.9357 |
| 236115 | 41049 | 5883449 | A/G | 0.835 | 0.749 | 0.0007 |
| 236116 | 41935 | 5884335 | C/T | 0.679 | 0.677 | 0.9439 |
| 236117 | 42775 | 5885175 | A/C | 0.926 | 0.903 | 0.1611 |
| 236118 | 43807 | 5886207 | T/C | 0.771 | 0.697 | 0.0060 |
| 236119 | 44254 | 5886654 | A/G | 0.773 | 0.694 | 0.0032 |
| 3761873 | 44814 | 5887214 | A/C | 0.044 | 0.042 | 0.8940 |
| 236120 | 45249 | 5887649 | T/G | 0.072 | 0.109 | 0.0291 |
| 451417 | 47599 | 5889999 | C/A | 0.086 | 0.103 | 0.3196 |
| 379418 | 47807 | 5890207 | G/A | 0.102 | 0.166 | 0.0022 |
| 2326680 | 48555 | 5890955 | A/C | 0.610 | 0.542 | 0.0233 |
| 409035 | 49249 | 5891649 | G/A | 0.788 | 0.700 | 0.0012 |
| 454422 | 49293 | 5891693 | A/C | 0.763 | 0.673 | 0.0013 |
| 236102 | 57566 | 5899966 | A/C | 0.856 | 0.780 | 0.0014 |
| 236103 | 63587 | 5905987 | T/C | 0.798 | 0.740 | 0.0205 |
| 236104 | 64560 | 5906960 | C/T | 0.793 | 0.714 | 0.0029 |
| 236105 | 65432 | 5907832 | C/G | 0.077 | 0.127 | 0.0065 |
| 236106 | 66291 | 5908691 | T/C | 0.109 | 0.154 | 0.0265 |
| 236107 | 71331 | 5913731 | A/T | 0.063 | 0.103 | 0.0159 |
| 180477 | 73344 | 5915744 | A/T | 0.768 | 0.698 | 0.0086 |
| 236108 | 74159 | 5916559 | C/T | 0.825 | 0.742 | 0.0012 |
| 236109 | 74564 | 5916964 | T/C | 0.162 | 0.170 | 0.7214 |
| 236121 | 78194 | 5920594 | A/G | 0.136 | 0.182 | 0.0345 |
| 236122 | 79128 | 5921528 | T/C | 0.862 | 0.790 | 0.0019 |
| 236123 | 79393 | 5921793 | C/T | 0.742 | 0.725 | 0.5078 |
| 236124 | 81579 | 5923979 | G/A | 0.867 | 0.800 | 0.0029 |
| 236125 | 82574 | 5924974 | C/T | 0.069 | 0.104 | 0.0385 |
| 2876003 | 85309 | 5927709 | G/C | 0.847 | 0.836 | 0.6067 |
| CHGB_SNP2 | 87076 | 5929476 | A/G | 0.783 | 0.734 | 0.0538 |
| 2423131 | 87844 | 5930244 | C/A | 0.471 | 0.427 | 0.1473 |
| 2206817 | 90241 | 5932641 | T/C | 0.974 | 0.985 | 0.2027 |

[0303] FIG. 16 shows the proximal SNPs in and around the CHGB and C20orf154 gene region. As indicated, some of the SNPs were untyped. The position of each SNP on the chromosome is presented on the x-axis. The y-axis gives the negative logarithm (base 10) of the p-value comparing the estimated allele in the case group to that of the control group. The minor allele frequency of the control group for each SNP designated by an X or other symbol on the graphs in FIG. 16 can be determined by consulting Table 18. By proceeding down the Table from top to bottom and across the graphs from left to right the allele frequency associated with each symbol shown can be determined.

[0304] To aid the interpretation, multiple lines have been added to the graph. The broken horizontal lines are drawn at two common significance levels, 0.05 and 0.01. The vertical broken lines are drawn every 20 kb to assist in the interpretation of distances between SNPs. Two other lines are drawn to expose linear trends in the association of SNPs to the disease. The light gray line (or generally bottom-most curve) is a nonlinear smoother through the data points on the graph using a local polynomial regression method (W. S. Cleveland, E. Grosse and W. M. Shyu (1992) Local regression models. Chapter 8 of Statistical Models in S eds J. M. Chambers and T. J. Hastie, Wadsworth & Brooks/Cole.). The black line (or generally top=most curve, e.g., see peak in left-most graph just to the left of position 92150000) provides a local test for excess statistical significance to identify regions of association. This was created by use of a 10 kb sliding window with 1 kb step sizes. Within each window, a chi-square goodness of fit test was applied to compare the proportion of SNPs that were significant at a test wise level of 0.01, to the proportion that would be expected by chance alone (0.05 for the methods used here). Resulting p-values that were less than 10⁻⁸ were truncated at that value.

[0305] Finally, the gene or genes present in the loci region of the proximal SNPs as annotated by Locus Link (http address: www.ncbi.nim.nih.gov/LocusLink/) are provided on the graph. The exons and introns of the genes in the covered region are plotted below each graph at the appropriate chromosomal positions. The gene boundary is indicated by the broken horizontal line. The exon positions are shown as thick, unbroken bars. An arrow is place at the 3′ end of each gene to show the direction of transcription.

[0306] Additional Genotyping

[0307] In addition to the CHGB/C20orf154 incident SNP, two other SNPs (rs742710 and rs236110) were genotyped in the discovery cohort and found to be significantly associated with breast cancer. See Table 24.

[0308] The methods used to verify and genotype the proximal SNP of Table 21 are the same methods described in Examples 1 and 2 herein. The PCR primers and extend primers used in these assays are provided in Table 22 and Table 23, respectively.

TABLE 22

| dbSNP | First | Second |
|---|---|---|
| rs# | PCR primer | PCR primer |
| 742710 | ACGTTGGATGGACATGAAATAGGCACGTGG | ACGTTGGATGAGAAAGTGAGGAAGAGAGGG |
| 236110 | ACGTTGGATGTCACTCTGTTTCTACTAACC | ACGTTGGATGATCGATCCAATGTTGACTGC |

[0309] TABLE 23

| dbSNP | Extend | Term |
|---|---|---|
| rs# | Primer | Mix |
| 742710 | AGAGAGGGGCCTTGAGC | ACG |
| 236110 | AATGTTGACTGCATTGACT | ACT |

[0310] Table 24, below, shows the case and control allele frequencies along with the p-values for the SNPs genotyped. The disease associated allele of column 4 is in bold and the disease associated amino acid of column 5 is also in bold. For rs742710 the proline is associated with breast cancer, and for rs236110, the glutamine is associated with breast cancer. The chromosome position provided corresponds to NCBI's Build 33.

TABLE 24
Genotpying Results

| | | | | Amino | | | | |
|---|---|---|---|---|---|---|---|---|
| dbSNP | Position in | Chromosome | Alleles | Acid | AF | AF | | Odds |
| rs# | | Position | (A1/A2) | Change | F case | F control | p-value | Ratio |
| 742710 | 9628 | 5852028 | G/A | P413L | A = 0.030 | A = 0.060 | 0.0279 | 0.51 |
| | | | | | G = 0.970 | G = 0.940 | | |
| 236110 | 38708 | 5881108 | T/G | Q63K | T = 0.080 | T = 0.130 | 0.0112 | 1.66 |
| | | | | | G = 0.920 | G = 0.870 | | |

### Example 6

### LOC338749 Proximal SNPs

[0311] It has been discovered that a polymorphic variation (rs763471) in the LOC338749 gene region is associated with the occurrence of breast cancer (see Examples 1 and 2). Subsequently, SNPs proximal to the incident SNP (rs763471) were identified and allelotyped in breast cancer sample sets and control sample sets as described in Examples 1 and 2. Approximately sixty-three allelic variants located within the LOC338749 region were identified and allelotyped. The polymorphic variants are set forth in Table 25. The chromosome position provided in column four of Table 25 is based on Genome “Build 33” of NCBI's GenBank.

TABLE 25

| dbSNP | | Position in | Chromosome | Allele |
|---|---|---|---|---|
| rs# | Chromosome | | Position | Variants |
| 2957666 | 11 | 142 | 10442142 | A/G |
| 2198010 | 11 | 693 | 10442693 | A/C |
| 2198009 | 11 | 731 | 10442731 | T/C |
| 2198008 | 11 | 879 | 10442879 | T/G |
| 2957667 | 11 | 1084 | 10443084 | C/A |
| 2957669 | 11 | 2249 | 10444249 | C/G |
| 2957670 | 11 | 2519 | 10444519 | A/G |
| 2923115 | 11 | 4461 | 10446461 | G/A |
| 2957679 | 11 | 4616 | 10446616 | A/G |
| 2957678 | 11 | 5109 | 10447109 | G/A |
| 2957677 | 11 | 5270 | 10447270 | C/G |
| 2923117 | 11 | 5436 | 10447436 | G/C |
| 2957675 | 11 | 5457 | 10447457 | T/C |
| 750371 | 11 | 6536 | 10448536 | G/C |
| 1562781 | 11 | 9665 | 10451665 | T/A |
| 752373 | 11 | 16120 | 10458120 | C/T |
| 3741045 | 11 | 29489 | 10471489 | T/C |
| 3741044 | 11 | 29524 | 10471524 | G/T |
| 763470 | 11 | 49159 | 10491159 | A/G |
| 763471 | 11 | 49273 | 10491273 | G/T |
| 1376001 | 11 | 49596 | 10491596 | A/G |
| 1376000 | 11 | 50135 | 10492135 | A/G |
| 1450274 | 11 | 50184 | 10492184 | C/G |
| 1375999 | 11 | 50393 | 10492393 | A/C |
| 1450273 | 11 | 50401 | 10492401 | T/G |
| 1450270 | 11 | 55750 | 10497750 | T/C |
| 899013 | 11 | 73843 | 10515843 | T/C |
| 2071019 | 11 | 73852 | 10515852 | T/C |
| LOC_SNP1 | 11 | 74052 | 10516052 | G/A |
| LOC_SNP2 | 11 | 75382 | 10517382 | A/G |
| 930672 | 11 | 75662 | 10517662 | T/A |
| 922359 | 11 | 75942 | 10517942 | T/C |
| 2403330 | 11 | 77917 | 10519917 | A/G |
| 936513 | 11 | 78821 | 10520821 | A/G |
| 3891547 | 11 | 94813 | 10536813 | G/G |
| 3741043 | 11 | 97149 | 10539149 | T/C |

Assay for Verifying and Allelotyping SNPs

[0312] The methods used to verify and allelotype the proximal SNPs of Table 25 are the same methods described in Examples 1 and 2 herein. The PCR primers and extend primers used in these assays provided in Table 26 and Table 27, respectively.

TABLE 26

| | | |
|---|---|---|
| dbSNP | Forward | Reverse |
| rs# | PCR primer | PCR primer |

| | | |
|---|---|---|
| 752373 | ACGTTGGATGTATCACAAGAACAGCATGGG | ACGTTGGATGATGGTTTCTGTAATCCCCCC |
| 763470 | ACGTTGGATGAAGAGGAGTGGCTGATAATG | ACGTTTGGATGAAGCAGAAAACTTTGTGCCG |
| 763471 | ACGTTGGATGGGCAGGTCATGGATTTATTG | ACGTTTGGATGCATCATTCCTCTGTGAGGCG |
| 763471 | ACGTTGGATGGTGAAGAGCTCTGAAATGCC | ACGTTGGATGTAACTCCTGTGTGGCTTTCT |
| 899011 | ACGTTGGATGAAGGTGGAGCCTGCCTCAAG | ACGTTGGATGAGCTTTGCACCCTGTGATGC |
| 899011 | ACGTTGGATGAAGGTGGAGCCTGCCTCAAG | ACGTTGGATGAGCTTTGCACCCTGTGATGC |
| 922359 | ACGTTGGATGTCAAGCGATCCTCTTCAGCC | ACGTTGGATGATTCATTCCAAGACCGGGTG |
| 930672 | ACGTTGGATGGTGGGTTACTTGGTCCATAC | ACGTTGGATGACAGAGCAAGACCTTCTCTC |
| 936513 | ACGTTGGATGGTATGAAGTTCTTGCAGAGT | ACGTTGGATGTACTACTGCACTCCAGCCTG |
| 1375999 | ACGTTGGATGCCATTCTTTTACCTTGAACC | ACGTTGGATGCAGAGACTTGCAGAATGGAC |
| 1376000 | ACGTTGGATGATAGCTGATGGTGTGCTGAG | ACGTTGGATGAAGCTTGCCTCCCAAGTTAG |
| 1376001 | ACGTTGGATGCAAACAATCCCATTACACAG | ACGTTGGATGCAGTACAACAGGGTGGCTATC |
| 1450270 | ACGTTGGATGCCATATCACATGGATATGAGG | ACGTTGGATGCATGGCTTCTCTTACACCTG |
| 1450273 | ACGTTGGATGGCTGCATATAAGAGACACATG | ACGTTGGATGGCCACTCCAGCTTTCTTTTG |
| 1450274 | ACGTTGGATGTGAGAGGAAGCCTGGTGTTG | ACGTTGGATGAAGCTTGCCTCCCAAGTTAG |
| 1562781 | ACGTTGGATGTATGTCTCCTGCCTTCTTCC | ACGTTGGATGGGAAAGAAGCTTGATGTGGC |
| 2071019 | ACGTTGGATGGGTAAACAACTGACCCATCC | ACGTTGGATGCCTGGGAAATAACCATGAGC |
| 2071020 | ACGTTGGATGAATTCACAGCTAAGCCTCCC | ACGTTGGATGTTCAGCTCCAGCTGCATGTT |
| 2198008 | ACGTTGGATGGTAGAAGTTTAGTATATGATG | ACGTTGGATGCCCTGTCATTTCAAATACCG |
| 2198009 | ACGTTGGATGCTTGTGCCAATCCCACAATG | ACGTTGGATGGCAGAAGTCTAGCCAAGAAC |
| 2198010 | ACGTTGGATGCTTGTGCCAATCCCACAATG | ACGTTGGATGAATGCAGAAGTCTAGCCAAG |
| 2403330 | ACGTTGGATGTAACTCTGAGACCCAAGGAC | ACGTTGGATGCCAGACAGTTGTGTGTTGAC |
| 2923115 | ACGTTGGATGGGATTACCCTAAGGATCCAC | ACGTTGGATGAGAGGAATTCAGTTGCTGCC |
| 2923117 | ACGTTGGATGTTGAGTCCAAGAGGTTGAGG | ACGTTGGATGAGACAGTCTTGCTCTGTCAC |
| 2957666 | ACGTTGGATGTACTTGGGAGACTGAGGTAG | ACGTTGGATGGCATAGTGGTGTGATCATGG |
| 2957667 | ACGTTGGATGAGAATGGTCTTTCCCACTCC | ACGTTGGATGATGGATTACGGAAGGAATAC |
| 2957669 | ACGTTGGATGTACTGAGACTCCCAGCATTG | ACGTTGGATGGTGTGCAGCTTAGTAAGTGC |
| 2957670 | ACGTTGGATGTCATGTGATTCTCCTGCCTC | ACGTTGGATGGTGAAACCCCGTCTCTACTA |
| 2957675 | ACGTTGGATGAGAATGACTTGGGTTTTGGG | ACGTTGGATGCAGTGAGTTGTGACAGCACC |
| 2957677 | ACGTTGGATGGTCTTTCTCAATCCCAGCAC | ACGTTGGATGACGAGATCTCCTTGTGTTGC |
| 2957678 | ACGTTGGATGAAGACCTCAGGATGTGATGC | ACGTTGGATGATGACCCCGTTTCTTTGCAC |
| 2957679 | ACGTTGGATGAGTTCGTCAGAGAGATGTCC | ACGTTGGATGGAGCACATGGATTCACAGAG |
| 3741043 | ACGTTGGATGGACATCAGAAGCTAATTGGG | ACGTTGGATGCTTCTTAATGGTAGGGCCAG |
| 3741044 | ACGTTGGATGTTTGTTATGCAGAGGTGGCC | ACGTTGGATGTAGATGGGCTCTTCTTGGAC |
| 3741045 | ACGTTGGATGAACTGAGCTTCAGACTTCCC | ACGTTGGATGTCAGACCTGTAGATGGGCTC |
| 3891547 | ACGTTGGATGGCCATCAAGTTTGTGGCAAT | ACGTTGGATGAAGCTATATGGAGCCCAAGG |

[0313] TABLE 27

| | | |
|---|---|---|
| dbSNP | Extend | Term |
| rs# | Primer | Mix |

| | | |
|---|---|---|
| 752373 | GGGACCAGGTGGAGATAA | ACG |
| 763470 | AGAAAACTTTGTGCCGTTTTCT | ACT |
| 763471 | CCAGGCAGCAACTCCCT | ACT |
| 763471 | CTCCAAGCAGTAAAGATGTTC | CGT |
| 899011 | TTGGTTTTAGAGGATTGCTCC | ACG |
| 899011 | GGTTTTAGAGGATTGCTCC | ACG |
| 922359 | TCATGCCTATAATCCAAGCA | ACT |
| 930672 | AAAAGCAAGAAACAACAGCA | CGT |
| 936513 | AGACAGGGTGAGACCTC | ACT |
| 1375999 | TATGCTGCATATAAGAGACACAT | ACT |
| 1376000 | ACATATTTCTGGTCTCCA | ACT |
| 1376001 | ACAGGGTGGCTATCATTAAC | ACT |
| 1450270 | TGTGAACTGAAAAGTCAAG | ACT |
| 1450273 | CTTGAACCTATTTCTGTTTTT | ACT |
| 1450274 | CTCCCAAGTTAGATTGGTTTA | ACT |
| 1562781 | CTTGATGTGGCTGAAGT | CGT |
| 2071019 | GTGCTGTTGAAATCCTGGG | ACT |
| 2071020 | AACCCTTTGTCAGCTGAA | ACT |
| 2198008 | CAGGCTTTTGGCTAAGATCAAG | ACT |
| 2198009 | AGTGAAGAATTTTCCCTATTAGAT | ACT |
| 2198010 | AAGTCTAGCCAAGAACATTT | ACT |
| 2403330 | CTCCCACTCCTCTCATCAG | ACT |
| 2923115 | GTTGCTGCCCGCTTTCC | ACG |
| 2923117 | CTCTGTCACCCATGCTGGA | ACT |
| 2957666 | ACCTCCTGGGCTCAAGC | ACT |
| 2957667 | GGAAGGAATACTAAAGAACAA | CGT |
| 2957669 | AGTAAGTGCTGTGATGCACC | ACT |
| 2957670 | TAGCTGAGCATGGTGGC | ACT |
| 2957675 | AGCATGGGTGACAGAGC | ACT |
| 2957677 | TGTGTTGCCCAGACTAG | ACT |
| 2957678 | ACTCCCTGGCCTCCCCT | ACG |
| 2957679 | TCACAGAGCTGCCAGGG | ACT |
| 3741043 | CAAAATTCTCCTGCCAC | ACT |
| 3741044 | GGGGAAAGGGAAGTCTG | CGT |
| 3741045 | TAGATGGGCTCTTCTTG | ACT |
| 3891547 | TATGGAGCCCAAGGATGACC | ACT |

Genetic Analysis and Allelotyping Results

[0314] Allelotyping results are shown for cases and controls in Table 28. The allele frequency for the A2 allele is noted in the fifth and sixth columns for breast cancer pools and control pools, respectively, where “AF” is allele frequency. The allele frequency for the A1 allele can be easily calculated by subtracting the A2 allele frequency from 1 (A1 AF=1−A2 AF). For example, the SNP rs2957666 has the following case and control allele frequencies: case A1 (A)=0.863; case A2 (G)=0.137; control A1 (A)=0.855; and control A2 (G)=0.145, where the nucleotide is provided in paranthesis. SNPs with blank allele frequencies were untyped.

TABLE 28

| dbSNP | Position in | Chromosome | A1/A2 | | A2 Control | |
|---|---|---|---|---|---|---|
| rs# | | Position | Allele | A2 Case AF | AF | p-Value |
| 2957666 | 142 | 10442142 | A/G | 0.145 | 0.137 | 0.6913 |
| 2198010 | 693 | 10442693 | A/C | 0.424 | 0.410 | 0.6335 |
| 2198009 | 731 | 10442731 | T/C | 0.485 | 0.469 | 0.6093 |
| 2198008 | 879 | 10442879 | T/G | 0.424 | 0.422 | 0.9461 |
| 2957667 | 1084 | 10443084 | C/A | 0.437 | 0.430 | 0.8105 |
| 2957669 | 2249 | 10444249 | C/G | 0.556 | 0.552 | 0.8955 |
| 2957670 | 2519 | 10444519 | A/G | 0.051 | 0.054 | 0.8305 |
| 2923115 | 4461 | 10446461 | G/A | 0.490 | 0.475 | 0.6091 |
| 2957679 | 4616 | 10446616 | A/G | 0.391 | 0.403 | 0.6947 |
| 2957678 | 5109 | 10447109 | G/A | 0.458 | 0.447 | 0.7210 |
| 2957677 | 5270 | 10447270 | C/G | 0.479 | 0.475 | 0.9147 |
| 2923117 | 5436 | 10447436 | G/C | 0.913 | 0.950 | 0.0164 |
| 2957675 | 5457 | 10447457 | T/C | 0.425 | 0.421 | 0.8857 |
| 750371 | 6536 | 10448536 | G/C | 0.143 | 0.174 | 0.1547 |
| 1562781 | 9665 | 10451665 | T/A | 0.966 | 0.973 | 0.4889 |
| 752373 | 16120 | 10458120 | C/T | 0.251 | 0.195 | 0.0255 |
| 3741045 | 29489 | 10471489 | T/C | 0.715 | 0.719 | 0.8787 |
| 3741044 | 29524 | 10471524 | G/T | 0.419 | 0.374 | 0.1272 |
| 763470 | 49159 | 10491159 | A/G | 0.139 | 0.137 | 0.9405 |
| 763471 | 49273 | 10491273 | G/T | 0.481 | 0.537 | 0.0661 |
| 1376001 | 49596 | 10491596 | A/G | 0.538 | 0.484 | 0.0705 |
| 1376000 | 50135 | 10492135 | A/G | 0.228 | 0.256 | 0.2849 |
| 1450274 | 50184 | 10492184 | C/G | 0.777 | 0.736 | 0.1185 |
| 1375999 | 50393 | 10492393 | A/C | 0.933 | 0.913 | 0.2078 |
| 1450273 | 50401 | 10492401 | T/G | 0.845 | 0.817 | 0.2102 |
| 1450270 | 55750 | 10497750 | T/C | 0.349 | 0.264 | 0.0025 |
| 899013 | 73843 | 10515843 | T/C | 0.388 | 0.385 | 0.9145 |
| 2071019 | 73852 | 10515852 | T/C | 0.824 | 0.782 | 0.0756 |
| LOC_SNP1 | 74052 | 10516052 | G/A | 0.245 | 0.217 | 0.2760 |
| LOC_SNP2 | 75382 | 10517382 | A/G | 0.283 | 0.327 | 0.1112 |
| 930672 | 75662 | 10517662 | T/A | 0.157 | 0.154 | 0.8763 |
| 922359 | 75942 | 10517942 | T/C | 0.106 | 0.120 | 0.4749 |
| 2403330 | 77917 | 10519917 | A/G | 0.624 | 0.574 | 0.0959 |
| 936513 | 78821 | 10520821 | A/G | 0.381 | 0.423 | 0.1554 |
| 3891547 | 94813 | 10536813 | C/G | 0.069 | 0.079 | 0.5157 |
| 3741043 | 97149 | 10539149 | T/C | 0.855 | 0.832 | 0.2972 |

[0315] FIG. 17 shows the proximal SNPs in and around the LOC338749 region for females. The position of each SNP on the chromosome is presented on the x-axis. The y-axis gives the negative logarithm (base 10) of the p-value comparing the estimated allele in the case group to that of the control group. The minor allele frequency of the control group for each SNP designated by an X or other symbol on the graphs in FIG. 17 can be determined by consulting Table 28. By proceeding down the Table from top to bottom and across the graphs from left to right the allele frequency associated with each symbol shown can be determined.

[0316] To aid the interpretation, multiple lines have been added to the graph. The broken horizontal lines are drawn at two common significance levels, 0.05 and 0.01. The vertical broken lines are drawn every 20 kb to assist in the interpretation of distances between SNPs. Two other lines are drawn to expose linear trends in the association of SNPs to the disease. The light gray line (or generally bottom-most curve) is a nonlinear smoother through the data points on the graph using a local polynomial regression method (W. S. Cleveland, E. Grosse and W. M. Shyu (1992) Local regression models. Chapter 8 of Statistical Models in S eds J. M. Chambers and T. J. Hastie, Wadsworth & Brooks/Cole.). The black line (or generally top-most curve, e.g., see peak in left-most graph just to the left of position 92150000) provides a local test for excess statistical significance to identify regions of association. This was created by use of a 10 kb sliding window with 1 kb step sizes. Within each window, a chi-square goodness of fit test was applied to compare the proportion of SNPs that were significant at a test wise level of 0.01, to the proportion that would be expected by chance alone (0.05 for the methods used here). Resulting p-values that were less than 10⁻⁸ were truncated at that value.

[0317] Finally, the gene or genes present in the loci region of the proximal SNPs as annotated by Locus Link (http address: www.ncbi.nlm.nih.gov/LocusLink/) are provided on the graph. The exons and introns of the genes in the covered region are plotted below each graph at the appropriate chromosomal positions. The gene boundary is indicated by the broken horizontal line. The exon positions are shown as thick, unbroken bars. An arrow is place at the 3′ end of each gene to show the direction of transcription.

### Example 7

### TTN/LOC351327 Proximal SNPs

[0318] It has been discovered that a polymorphic variation (rs2046778) in the TTN/LOC351327 region is associated with the occurrence of breast cancer (see Examples 1 and 2). Subsequently, SNPs proximal to the incident SNP (rs2046778) were identified and allelotyped in breast cancer sample sets and control sample sets as described in Examples 1 and 2. Approximately forty-six allelic variants located within the TTN/LOC351327 region were identified and allelotyped. The polymorphic variants are set forth in Table 29. The chromosome position provided in column four of Table 29 is based on Genome “Build 33” of NCBI's GenBank.

TABLE 29

| dbSNP | | Position in | Chromosome | Allele |
|---|---|---|---|---|
| rs# | Chromosome | | Position | Variants |
| 2291309 | 2 | 200 | 179587600 | T/G |
| 2291310 | 2 | 381 | 179587781 | T/C |
| 1484119 | 2 | 5303 | 179592703 | G/C |
| TTN_SNP1 | 2 | 6084 | 179593484 | C/T |
| 1484120 | 2 | 6879 | 179594279 | T/A |
| 2291312 | 2 | 7837 | 179595237 | T/C |
| 3816782 | 2 | 7985 | 179595385 | C/A |
| 2291313 | 2 | 9333 | 179596733 | T/C |
| 2306636 | 2 | 11559 | 179598959 | T/C |
| 2291304 | 2 | 12473 | 179599873 | T/C |
| 2291305 | 2 | 12880 | 179600280 | T/A |
| 1905520 | 2 | 13606 | 179601006 | C/T |
| 2291306 | 2 | 14861 | 179602261 | A/G |
| TTN_SNP2 | 2 | 20658 | 179608058 | C/T |
| 2054708 | 2 | 22200 | 179609600 | G/A |
| 2306637 | 2 | 24525 | 179611925 | A/C |
| 3769863 | 2 | 26373 | 179613773 | T/G |
| 3769860 | 2 | 42869 | 179630269 | A/T |
| 3816849 | 2 | 43713 | 179631113 | A/G |
| 3769858 | 2 | 44429 | 179631829 | A/G |
| 2279472 | 2 | 49037 | 179636437 | A/G |
| 2046778 | 2 | 49170 | 179636570 | A/G |
| 1565288 | 2 | 50206 | 179637606 | G/A |
| 2129108 | 2 | 51552 | 179638952 | C/T |
| 2170850 | 2 | 51674 | 179639074 | T/G |
| 2029397 | 2 | 56427 | 179643827 | T/C |
| 2029395 | 2 | 56844 | 179644244 | G/A |
| 1844334 | 2 | 57953 | 179645353 | A/G |
| 998329 | 2 | 60862 | 179648262 | G/A |
| 1489486 | 2 | 61606 | 179649006 | T/C |
| 2046777 | 2 | 62560 | 179649960 | G/A |
| 1489483 | 2 | 65078 | 179652478 | A/G |
| 1489482 | 2 | 65155 | 179652555 | G/T |
| 2366911 | 2 | 70295 | 179657695 | T/C |
| 2366912 | 2 | 70335 | 179657735 | G/T |
| 2366913 | 2 | 70398 | 179657798 | C/T |
| 2078403 | 2 | 79233 | 179666633 | C/T |
| 1489481 | 2 | 80025 | 179667425 | C/G |
| 2129111 | 2 | 84521 | 179671921 | A/G |
| 966783 | 2 | 84540 | 179671940 | C/T |
| 1489480 | 2 | 85170 | 179672570 | T/G |
| 1489479 | 2 | 85300 | 179672700 | A/C |
| 726215 | 2 | 87596 | 179674996 | A/C |
| 1387472 | 2 | 89696 | 179677096 | C/A |
| 2086832 | 2 | 92219 | 179679619 | A/T |
| 1872203 | 2 | 96589 | 179683989 | A/T |

Assay for Verifying and Allelotyping SNPs

[0319] The methods used to verify and allelotype the proximal SNPs of Table 29 are the same methods described in Examples 1 and 2 herein. The PCR primers and extend primers used in these assays are provided in Table 30 and Table 31, respectively. The methods used to verify and allelotype the proximal SNPs of Table 29 are the same methods described in Examples 1 and 2 herein. The PCR primers and extend primers used in these assays are provided in Table 30 and Table 31, respectively.

TABLE 30

| | | |
|---|---|---|
| dbSNP | Forward | Reverse |
| rs# | PCR primer | PCR primer |

| | | |
|---|---|---|
| 726215 | ACGTTGGATGAACTGAGCCCCATGAAATGC | ACGTTGGATGAAAACAGCAATTGAGAACAC |
| 966783 | ACGTTGGATGCTCCTGAATTTTAGCCATAC | ACGTTGGATGTACGCAATAGTTCCTGGGAG |
| 998329 | ACGTTGGATGGAAGAGCACATTATTGCTGG | ACGTTGGATGACACACTGGTGTTTTGTCAG |
| 1387472 | ACGTTGGATGGAAAGGCCTTGAATTGGAAC | ACGTTGGATGGTTCTGCTAGTGTCATCTTC |
| 1484119 | ACGTTGGATGGCAGCTACAATCATAAAGGG | ACGTTGGATGTGTGCCCTTAATAATGGTTG |
| 1484120 | ACGTTGGATGATGGTCATGGCATCCAGTTC | ACGTTGGATGGGCTGGTTTCTGACACTATC |
| 1489479 | ACGTTGGATGGGAGCATCAGTCATTTTGGG | ACGTTGGATGCACCAGGACATAACATGACG |
| 1489480 | ACGTTGGATGGGGTTGTGGAGAATCATTAC | ACGTTGGATGGGTGGCAGTAATCTTCACTT |
| 1489481 | ACGTTGGATGTCTCTGCAGTTGAGGAGATG | ACGTTGGATGTTGGGAAAGGCCATCAAGTC |
| 1489482 | ACGTTGGATGCTCTGGATAAAAGACTCAGC | ACGTTGGATGCCCTTCCAACAGCTATCTGG |
| 1489483 | ACGTTGGATGTTGGTTTGCTATCAATGAAG | ACGTTGGATGGATAGGTGTACACATATAGC |
| 1489486 | ACGTTGGATGAAAAAACACACCACAGCCCC | ACGTTGGATGCTTCGTATTFGGCTCTGACC |
| 1552280 | ACGTTGGATGATGAAAAGTGACACCCATCC | ACGTTGGATGTCTGAAGCTGTTGAATCAGG |
| 1565288 | ACGTTGGATGTAGCCAATTGGTGAACACTC | ACGTTGGATGCTGCCAGTCATAAGGCAAAG |
| 1844334 | ACGTTGGATGGCCAAGGAAACTAATTCCTG | ACGTTGGATGCACTTTTGGAAGACAGTTCGG |
| 1872203 | ACGTTGGATGGTTGCATTAGCTGTTATTCTC | ACGTTGGATGCCAGCAATTCTATTTCAGAG |
| 1905520 | ACGTTGGATGCATGGTTTATACTTACTTACG | ACGTTGGATGGTTTATTCCTGTTTCCACAC |
| 2029395 | ACGTTGGATGGGAGGGAGACAAAGATTCAC | ACGTTGGATGGCAACAGTTTCACCTTTGGC |
| 2029397 | ACGTTGGATGCTCACAGTCCTGAAGACTTG | ACGTTGGATGTGGAAGTGAAGGAGAGAAGC |
| 2046777 | ACGTTGGATGGGACTTCAAATATGGTTCAC | ACGTTGGATGTTAAGCCTGGGACTTTTGGG |
| 2046778 | ACGTTGGATGGTTCCCTTCCCCCATAAAAC | ACGTTGGATGCATGAAGCCTTATGCTTGAG |
| 2054708 | ACGTTGGATGCTAGGCATATCATGCCTCTG | ACGTTGGATGTTGAGCTCACTGTTACCTGC |
| 2078403 | ACGTTGGATGTGTGCTCAGGATCGACAGAC | ACGTTGGATGACTCGAGACAACCTACAAGG |
| 2086832 | ACGTTGGATGCTTTTGAGCATCACATTCCTC | ACGTTGGATGTGCCTAAGCACTGTATAACC |
| 2129108 | ACGTTGGATGAACTCCCAGTAAGTCCTTCC | ACGTTGGATGACTCAGGCAGTAACTCCAAC |
| 2129111 | ACGTTGGATGTACACTTTTCCCGCAAGACC | ACGTTGGATGGTCATGGACATCTACAGTATC |
| 2170850 | ACGTTGGATGGAAGGCCAATGCAAGGATAC | ACGTTGGATGAAGAACACACAAAAAAAT |
| 2279472 | ACGTTGGATGGAGAAGAGCATTGGTTGCTG | ACGTTGGATGTGCCCACAAGTGCTATCTAC |
| 2291304 | ACGTTGGATGGTCTCAGGAAGGTTTAGAGG | ACGTTGGATGAAAAGACAAACGATATGGCC |
| 2291305 | ACGTTGGATGCATGATTTCAAAATCATGTTC | ACGTTTGGATGGAGATGTACAGTATGAGTCC |
| 2291306 | ACGTTGGATGCAGCGACTAGTCATTTAACCG | ACGTTGGATGCAGTTGGTTTCAACTCTGCC |
| 2291309 | ACGTTTGGATGCATTGTTGTTCCTACCATTC | ACGTTGGATGAAAGTGGTAAAGGAGAGGCG |
| 2291310 | ACGTTGGATGGTGCTTGATACTTGGCCTAC | ACGTTGGATGCAACTGGAAATTGCCGAAGC |
| 2291311 | ACGTTGGATGTCAACATTTTACTCCTAGCTC | ACGTTGGATGATTTTGGGCTGTGGTCTTCC |
| 2291312 | ACGTTGGATGTGTATTCTCCTGCATCGCTC | ACGTTGGATGTCCAAGTTCAAGAACGACAC |
| 2291313 | ACGTTGGATGTTCGAGTTTTACCGTATGGTG | ACGTTGGATGGATCACAGACAGGTCAGTTG |
| 2306636 | ACGTTGGATGCTGAGACCAGTCTGTGTTTG | ACGTTGGATGGTTTCCCATGACACTGTTCC |
| 2306637 | ACGTTGGATGCTACTACTATTTCTGGAGTC | ACGTTGGATGCTTATGCATTTCAACTGCCAC |
| 2366911 | ACGTTGGATGGTAGATGCTTGAATCAATAAAG | ACGTTGGATGATAGCAGCTCCAGAACTAGG |
| 2366912 | ACGTTTGGATGGAACTGTTGTTGAATGGGAC | ACGTTGGATGCAATACTTGTAAAATAGCAGC |
| 2366913 | ACGTTGGATGCTATCTGTATTCTCATGGCTG | ACGTTGGATGTTACCTAGTTCTGGAGCTGC |
| 3769858 | ACGTTGGATGCTACATGTCCATGGTTTGATG | ACGTTGGATGGCATCAACCTTTATGCCAAG |
| 3769860 | ACGTTGGATGGTATACAGAATATTGCATGCC | ACGTTGGATGGAACATCATTGAAGGTAAAG |
| 3769863 | ACGTTGGATGCAAGGATTTATTTACATGCTG | ACGTTGGATGGTCATCAGGAGAAAGTAAGC |
| 3816782 | ACGTTGGATGGAGGAAACCAGAGCTTCAAG | ACGTTGGATGCAGCACGCTGTTTCTCAATG |
| 3816849 | ACGTTGGATGAACCAGCTCACCTCAGGAAC | ACGTTGGATGTTTGTGGTGCCCATTCAAAC |

[0320] TABLE 31

| | | |
|---|---|---|
| dbSNP | Extend | Term |
| rs# | Primer | Mix |

| | | |
|---|---|---|
| 726215 | TTGAGAACACAGGATGC | ACT |
| 966783 | CTCCCATTTTGGTCTTG | ACG |
| 998329 | GGTGTTTTGTCAGTACAATT | ACG |
| 1387472 | ACTACAAACTCTTTCCTTACC | CGT |
| 1484119 | GTTGTTTATGTTTATGTTATGTGTT | ACT |
| 1484120 | TGTGCCTCAGTTTCTCC | CGT |
| 1489479 | GACAGCTGTAATTGTAGACC | ACT |
| 1489480 | CTCAATCACATTTACCCTC | ACT |
| 1489481 | TCTGATTGTTCCATTTAATATCTG | ACT |
| 1489482 | CAGCTATCTGGAAATCTTGTTTGA | CGT |
| 1489483 | GTGTACACATATAGCAACCTCA | ACT |
| 1489486 | CTCTGACCTGTGAGCTAC | ACT |
| 1552280 | GCTGTTGAATCAGGATTTGATT | ACG |
| 1565288 | GGCAAAGAAACACTAGAAA | ACG |
| 1844334 | CAGTTCGGCAGTTTCTT | ACT |
| 1872203 | AAAAAATCATGAAAAGGAGCATG | CGT |
| 1905520 | ACAAGTCTTTTCATGGTC | ACG |
| 2029395 | CAAAATGAAGGAACACTTATCA | ACG |
| 2029397 | AGCTCTGTTGGCACTTT | ACT |
| 2046777 | GAGCCTGATTATTTGTTTGGGTA | ACG |
| 2046778 | CTGTCATGATTGACAGGTCC | ACT |
| 2054708 | CCTGGGCCTGGAAGGCAAC | ACG |
| 2078403 | GGCTGGAGCAAGAATTA | ACG |
| 2086832 | CAATGTAATCCTTGGATAGAT | CGT |
| 2129108 | CAACTACATAGTCAGACTTT | ACT |
| 2129111 | TATACGCAATAGTTCCTGGG | ACT |
| 2170850 | GAACACACAAAAAAATTTAATCA | ACT |
| 2279472 | CTCTTTAAACCTGCATTTTC | ACT |
| 2291304 | CGATATGGCCATTTTGG | ACT |
| 2291305 | CATATTCACACAATGGGAAAA | CGT |
| 2291306 | CTGCCAACTATCAGCTT | ACT |
| 2291309 | GCGAGACCATGGCATATAACA | ACT |
| 2291310 | AACTTACACGTTTGTTGCTA | ACT |
| 2291311 | GTGGTCTTCCGGATATCA | ACG |
| 2291312 | CGACACAAATATGTAGTGGA | ACT |
| 2291313 | TGTCTTGCTACATTCCAGT | ACT |
| 2306636 | TCCAGTAAAATGGTTCCATAAGA | ACT |
| 2306637 | TCAACTGCCACAAAATG | ACT |
| 2366911 | TTCCTTTGTCCCATTCA | ACT |
| 2366912 | TGTAAAATAGCAGCTCCAGAA | CGT |
| 2366913 | ATTCTAAATGGAAAAAGAGCCA | ACG |
| 3769858 | TGCCCTGAATGTGCCTC | ACT |
| 3769860 | GGATAAGCATATGTAACTTTACG | CGT |
| 3769863 | AAGTAAAAAGGACATAAAAACCT | ACT |
| 3816782 | GTTGATGGAACAACATAAAA | CGT |
| 3816849 | GCCCATTCAAACATAAAG | ACT |

Genetic Analysis and Allelotyping Results

[0321] Allelotyping results are shown for cases and controls in Table 32. The allele frequency for the A2 allele is noted in the fifth and sixth columns for breast cancer pools and control pools, respectively, where “AF” is allele frequency. The allele frequency for the A1 allele can be easily calculated by subtracting the A2 allele frequency from 1 (A1 AF=1−A2 AF). For example, the SNP rs2291309 has the following case and control allele frequencies: case A1 (T)=0.190; case A2 (G)=0.810; control A1 (T)=0.215; and control A2 (G)=0.785, where the nucleotide is provided in paranthesis. SNPs with blank allele frequencies were untyped.

TABLE 32

| dbSNP | Position in | Chromosome | A1/A2 | | A2 Control | |
|---|---|---|---|---|---|---|
| rs# | | Position | Allele | A2 Case AF | AF | p-Value |
| 2291309 | 200 | 179587600 | T/G | 0.785 | 0.810 | 0.3114 |
| 2291310 | 381 | 179587781 | T/C | 0.069 | 0.073 | 0.8256 |
| 1484119 | 5303 | 179592703 | G/C | 0.726 | 0.714 | 0.6532 |
| TTN_SNP1 | 6084 | 179593484 | C/T | 0.795 | 0.796 | 0.9735 |
| 1484120 | 6879 | 179594279 | T/A | 0.952 | 0.957 | 0.6579 |
| 2291312 | 7837 | 179595237 | T/C | 0.064 | 0.062 | 0.8817 |
| 3816782 | 7985 | 179595385 | C/A | 0.853 | 0.858 | 0.8139 |
| 2291313 | 9333 | 179596733 | T/C | 0.702 | 0.662 | 0.1474 |
| 2306636 | 11559 | 179598959 | T/C | 0.921 | 0.929 | 0.6434 |
| 2291304 | 12473 | 179599873 | T/C | 0.050 | 0.025 | 0.0307 |
| 2291305 | 12880 | 179600280 | T/A | 0.040 | 0.037 | 0.7733 |
| 1905520 | 13606 | 179601006 | C/T | 0.014 | 0.027 | 0.1559 |
| 2291306 | 14861 | 179602261 | A/G | 0.805 | 0.839 | 0.1348 |
| TTN_SNP2 | 20658 | 179608058 | C/T | 0.773 | 0.821 | 0.0491 |
| 2054708 | 22200 | 179609600 | G/A | 0.893 | 0.883 | 0.6092 |
| 2306637 | 24525 | 179611925 | A/C | 0.999 | 0.956 | 0.0000 |
| 3769863 | 26373 | 179613773 | T/G | 0.382 | 0.409 | 0.3545 |
| 3769860 | 42869 | 179630269 | A/T | 0.025 | 0.022 | 0.7358 |
| 3816849 | 43713 | 179631113 | A/G | 0.374 | 0.390 | 0.5938 |
| 3769858 | 44429 | 179631829 | A/G | 0.515 | 0.561 | 0.1296 |
| 2279472 | 49037 | 179636437 | A/G | 0.916 | 0.871 | 0.0156 |
| 2046778 | 49170 | 179636570 | A/G | 0.171 | 0.231 | 0.0122 |
| 1565288 | 50206 | 179637606 | G/A | 0.978 | 0.979 | 0.9096 |
| 2129108 | 51552 | 179638952 | C/T | 0.886 | 0.807 | 0.0005 |
| 2170850 | 51674 | 179639074 | T/G | 0.906 | 0.863 | 0.0258 |
| 2029397 | 56427 | 179643827 | T/C | 0.094 | 0.114 | 0.2585 |
| 2029395 | 56844 | 179644244 | G/A | 0.825 | 0.810 | 0.5200 |
| 1844334 | 57953 | 179645353 | A/G | 0.536 | 0.533 | 0.9266 |
| 998329 | 60862 | 179648262 | G/A | 0.035 | 0.055 | 0.1078 |
| 1489486 | 61606 | 179649006 | T/C | 0.646 | 0.674 | 0.3300 |
| 2046777 | 62560 | 179649960 | G/A | 0.910 | 0.875 | 0.0573 |
| 1489483 | 65078 | 179652478 | A/G | 0.188 | 0.205 | 0.4857 |
| 1489482 | 65155 | 179652555 | G/T | 0.058 | 0.084 | 0.0944 |
| 2366911 | 70295 | 179657695 | T/C | 0.298 | 0.268 | 0.2753 |
| 2366912 | 70335 | 179657735 | G/T | 0.238 | 0.186 | 0.0341 |
| 2366913 | 70398 | 179657798 | C/T | 0.259 | 0.214 | 0.0772 |
| 2078403 | 79233 | 179666633 | C/T | 0.551 | 0.564 | 0.6795 |
| 1489481 | 80025 | 179667425 | C/G | 0.270 | 0.251 | 0.4774 |
| 2129111 | 84521 | 179671921 | A/G | 0.324 | 0.256 | 0.0127 |
| 966783 | 84540 | 179671940 | C/T | 0.210 | 0.178 | 0.1714 |
| 1489480 | 85170 | 179672570 | T/G | 0.426 | 0.398 | 0.3465 |
| 1489479 | 85300 | 179672700 | A/C | 0.414 | 0.372 | 0.1553 |
| 726215 | 87596 | 179674996 | A/C | 0.141 | 0.194 | 0.0173 |
| 1387472 | 89696 | 179677096 | C/A | 0.106 | 0.097 | 0.6242 |
| 2086832 | 92219 | 179679619 | A/T | 0.211 | 0.298 | 0.0014 |
| 1872203 | 96589 | 179683989 | A/T | 0.652 | 0.577 | 0.0113 |

[0322] FIG. 18 shows the proximal SNPs in and around the TTN region for females. The position of each SNP on the chromosome is presented on the x-axis. The y-axis gives the negative logarithm (base 10) of the p-value comparing the estimated allele in the case group to that of the control group. The minor allele frequency of the control group for each SNP designated by an X or other symbol on the graphs in FIG. 18 can be determined by consulting Table 32. By proceeding down the Table from top to bottom and across the graphs from left to right the allele frequency associated with each symbol shown can be determined.

[0323] To aid the interpretation, multiple lines have been added to the graph. The broken horizontal lines are drawn at two common significance levels, 0.05 and 0.01. The vertical broken lines are drawn every 20 kb to assist in the interpretation of distances between SNPs. Two other lines are drawn to expose linear trends in the association of SNPs to the disease. The light gray line (or generally bottom-most curve) is a nonlinear smoother through the data points on the graph using a local polynomial regression method (W. S. Cleveland, E. Grosse and W. M. Shyu (1992) Local regression models. Chapter 8 of Statistical Models in S eds J. M. Chambers and T. J. Hastie, Wadsworth & Brooks/Cole.). The black line (or generally top-most curve, e.g., see peak in left-most graph just to the left of position 92150000) provides a local test for excess statistical significance to identify regions of association. This was created by use of a 10 kb sliding window with I kb step sizes. Within each window, a chi-square goodness of fit test was applied to compare the proportion of SNPs that were significant at a test wise level of 0.01, to the proportion that would be expected by chance alone (0.05 for the methods used here). Resulting p-values that were less than 10⁻⁸ were truncated at that value.

[0324] Finally, the gene or genes present in the loci region of the proximal SNPs as annotated by Locus Link (http address: www.ncbi.nlm.nih.gov/LocusLink/) are provided on the graph. The exons and introns of the genes in the covered region are plotted below each graph at the appropriate chromosomal positions. The gene boundary is indicated by the broken horizontal line. The exon positions are shown as thick, unbroken bars. An arrow is place at the 3′ end of each gene to show the direction of transcription.

### Example 8

### In Vitro Production of Target Polypeptides

[0325] cDNA is cloned into a pIVEX 2.3-MCS vector (Roche Biochem) using a directional cloning method. A cDNA insert is prepared using PCR with forward and reverse primers having 5′ restriction site tags (in frame) and 5-6 additional nucleotides in addition to 3′ gene-specific portions, the latter of which is typically about twenty to about twenty-five base pairs in length. A Sal I restriction site is introduced by the forward primer and a Sma I restriction site is introduced by the reverse primer. The ends of PCR products are cut with the corresponding restriction enzymes (i.e., Sal I and Sma I) and the products are gel-purified. The pIVEX 2.3-MCS vector is linearized using the same restriction enzymes, and the fragment with the correct sized fragment is isolated by gel-purification. Purified PCR product is ligated into the linearized pIVEX 2.3-MCS vector and E. coli cells transformed for plasmid amplification. The newly constructed expression vector is verified by restriction mapping and used for protein production.

[0326] E. coli lysate is reconstituted with 0.25 ml of Reconstitution Buffer, the Reaction Mix is reconstituted with 0.8 ml of Reconstitution Buffer; the Feeding Mix is reconstituted with 10.5 ml of Reconstitution Buffer; and the Energy Mix is reconstituted with 0.6 ml of Reconstitution Buffer. 0.5 ml of the Energy Mix was added to the Feeding Mix to obtain the Feeding Solution. 0.75 ml of Reaction Mix, 50 μl of Energy Mix, and 10 μg of the template DNA is added to the E. coli lysate.

[0327] Using the reaction device (Roche Biochem), 1 ml of the Reaction Solution is loaded into the reaction compartment. The reaction device is turned upside-down and 10 ml of the Feeding Solution is loaded into the feeding compartment. All lids are closed and the reaction device is loaded into the RTS500 instrument. The instrument is run at 30° C. for 24 hours with a stir bar speed of 150 rpm. The pIVEX 2.3 MCS vector includes a nucleotide sequence that encodes six consecutive histidine amino acids on the C-terminal end of the target polypeptide for the purpose of protein purification. Target polypeptide is purified by contacting the contents of reaction device with resin modified with Ni²⁺ ions. Target polypeptide is eluted from the resin with a solution containing free Ni²⁺ ions.

### Example 9

### Cellular Production of Target Polypeptides

[0328] Nucleic acids are cloned into DNA plasmids having phage recombination cites and target polypeptides are expressed therefrom in a variety of host cells. Alpha phage genomic DNA contains short sequences known as attP sites, and E. coli genomic DNA contains unique, short sequences known as attB sites. These regions share homology, allowing for integration of phage DNA into E. coli via directional, site-specific recombination using the phage protein Int and the E. coli protein IHF. Integration produces two new att sites, L and R, which flank the inserted prophage DNA. Phage excision from E. coli genomic DNA can also be accomplished using these two proteins with the addition of a second phage protein, Xis. DNA vectors have been produced where the integration/excision process is modified to allow for the directional integration or excision of a target DNA fragment into a backbone vector in a rapid in vitro reaction (Gateway™ Technology (Invitrogen, Inc.)).

[0329] A first step is to transfer the nucleic acid insert into a shuttle vector that contains attL sites surrounding the negative selection gene, ccdB (e.g. pENTER vector, Invitrogen, Inc.). This transfer process is accomplished by digesting the nucleic acid from a DNA vector used for sequencing, and to ligate it into the multicloning site of the shuttle vector, which will place it between the two attL sites while removing the negative selection gene ccdB. A second method is to amplify the nucleic acid by the polymerase chain reaction (PCR) with primers containing attB sites. The amplified fragment then is integrated into the shuttle vector using Int and IHF. A third method is to utilize a topoisomerase-mediated process, in which the nucleic acid is amplified via PCR using gene-specific primers with the 5′ upstream primer containing an additional CACC sequence (e.g., TOPO® expression kit (Invitrogen, Inc.)). In conjunction with Topoisomerase I, the PCR amplified fragment can be cloned into the shuttle vector via the attL sites in the correct orientation.

[0330] Once the nucleic acid is transferred into the shuttle vector, it can be cloned into an expression vector having attR sites. Several vectors containing attR sites for expression of target polypeptide as a native polypeptide, N-fusion polypeptide, and C-fusion polypeptides are commercially available (e.g., pDEST (Invitrogen, Inc.)), and any vector can be converted into an expression vector for receiving a nucleic acid from the shuttle vector by introducing an insert having an attR site flanked by an antibiotic resistant gene for selection using the standard methods described above. Transfer of the nucleic acid from the shuttle vector is accomplished by directional recombination using Int, IHF, and Xis (LR clonase). Then the desired sequence can be transferred to an expression vector by carrying out a one hour incubation at room temperature with Int, IHF, and Xis, a ten minute incubation at 37° C. with proteinase K, transforming bacteria and allowing expression for one hour, and then plating on selective media. Generally, 90% cloning efficiency is achieved by this method. Examples of expression vectors are pDEST 14 bacterial expression vector with att7 promoter, pDEST 15 bacterial expression vector with a T7 promoter and a N-terminal GST tag, pDEST 17 bacterial vector with a T7 promoter and a N-terminal polyhistidine affinity tag, and pDEST 12.2 mammalian expression vector with a CMV promoter and neo resistance gene. These expression vectors or others like them are transformed or transfected into cells for expression of the target polypeptide or polypeptide variants. These expression vectors are often transfected, for example, into murine-transformed a adipocyte cell line 3T3-L1, (ATCC), human embryonic kidney cell line 293, and rat cardiomyocyte cell line H9C2.

### Example 10

### Haplotype Analysis of the GP6 Locus

[0331] rs1671152 is significantly associated with breast cancer at the allele level (P<0.05). This relationship does not hold at the genotype level. Very weak LD is observed across markers in the region. Estimated chi-squared statistics, odds ratios, and score tests indicate that haplotypes are not significantly associated with breast cancer.

[0332] Statistics

[0333] Chi-squared statistics are estimated to assess whether 1) alleles and genotypes are associated with breast cancer status and 2) marker genotype frequencies deviate significantly from Hardy-Weinberg equilibrium (HWE). Haplotype frequencies and relative frequencies are estimated, as well as several statistics (r², D′, and p-value) that gauge the extent and stability of linkage disequilibrium between markers in each region. Chi-squared statistics and score tests are estimated to determine whether reconstructed haplotypes are significantly associated with breast cancer status (P <0.05). P-values are estimated for 1) the full set of reconstructed haplotypes and 2) a reduced set that excludes haplotypes with observed frequencies less than 10. Results are presented by chromosome order.

Results

[0334] Summary Statistics: Alleles and Genotypes

SNP Locations

| SNP.ID | Type | Location |
|---|---|---|
| 269911 | Proximal | 60156885 |
| 1671152 | Incident | 60202366 |
| 2124090 | Proximal | 60240477 |

[0335] Allele by GYNGroup

| | | Case | Control | Test |
|---|---|---|---|---|
| | N | (N = 508) | (N = 536) | Statistic |
| 269911: T | 1008 | 18% (90) | 16% (85) | Chi-square = 0.77 |
| | | | | d.f. = 1 P = 0.38 |
| 1671152: G | 1008 | 86% (408) | 81% (431) | Chi-square = 3.98 |
| | | | | d.f. = 1 P = 0.0462 |
| 2124090: A | 1022 | 13% (64) | 11% (56) | Chi-square = 1.47 |
| | | | | d.f. = 1 P = 0.226 |

[0336] Genotype by GYNGroup

| | | Case | Control | |
|---|---|---|---|---|
| | N | (N = 254) | (N = 268) | Test Statistic |
| 269911: AA | 504 | 68% (165) | 71% (184) | Chi-square = 0.73 |
| | | | | d.f. = 2 P = 0.693 |
| AT | | 28% (68) | 26% (67) | |
| TT | | 5% (11) | 3% (9) | |
| 1671152: TT | 504 | 4% (10) | 5% (13) | Chi-square = 4.79 |
| | | | | d.f. = 2 P = 0.0912 |
| TG | | 20% (48) | 28% (75) | |
| GG | | 76% (180) | 67% (178) | |
| 2124090: CC | 511 | 75% (184) | 80% (213) | Chi-square = 3.42 |
| | | | | d.f. = 2 P = 0.181 |
| CA | | 24% (60) | 18% (48) | |
| AA | | 1% (2) | 2% (4) | |

[0337] Genotyping QC: Test of Hardy-Weinberg Proportions

All

| | A.freq | D | ChiSq | Pvalue |
|---|---|---|---|---|
| 269911 | 0.824 | 0.00943 | 2.070 | 0.15000 |
| 1671152 | 0.832 | 0.01830 | 8.430 | 0.00369 |
| 2124090 | 0.882 | −0.00167 | 0.128 | 0.72100 |

[0338] Control

| | A.freq | D | ChiSq | Pvalue |
|---|---|---|---|---|
| 269911 | 0.836 | 0.00782 | 0.842 | 0.359 |
| 1671152 | 0.807 | 0.01290 | 1.780 | 0.182 |
| 2124090 | 0.896 | 0.00458 | 0.622 | 0.430 |

[0339] Summary Statistics: Linkage Disequilibrium

PHASE Haplotype Frequencies

| | H.freq | H.relfreq |
|---|---|---|
| AGA | 113 | 0.115 |
| AGC | 534 | 0.542 |
| ATA | 1 | 0.001 |
| ATC | 164 | 0.166 |
| TGA | 2 | 0.002 |
| TGC | 171 | 0.173 |
| TTC | 1 | 0.001 |

[0340] Linkage Disequilibrium Between Markers

r²

| | 269911 | 1671152 | 2124090 |
|---|---|---|---|
| 269911 | 1.0000 | 0.0405 | 0.0233 |
| 1671152 | 0.0405 | 1.0000 | 0.0243 |
| 2124090 | 0.0233 | 0.0243 | 1.0000 |

[0341] D′

| | 269911 | 1671152 | 2124090 |
|---|---|---|---|
| 269911 | 1.000 | 0.207 | 0.193 |
| 1671152 | 0.207 | 1.000 | 0.192 |
| 2124090 | 0.193 | 0.192 | 1.000 |

[0342] P-value

| | 269911 | 1671152 | 2124090 |
|---|---|---|---|
| 269911 | 1.00e+00 | 2.67e−10 | 1.68e−06 |
| 1671152 | 2.67e−10 | 1.00e+00 | 9.84e−07 |
| 2124090 | 1.68e−06 | 9.84e−07 | 1.00e+00 |

[0343] Haplotype by GYNGroup

PHASE Haplotypes (All)

| | Case | Case (%) | se.X\hat{ }2 | Control | Control (%) | Control.X\hat{ }2 | OR | ln.OR |
|---|---|---|---|---|---|---|---|---|
| ATC | 66 | 6.72 | 1.80 | 98 | 9.98 | 1.62 | 0.6499 | −0.4309 |
| AGC | 253 | 25.76 | 0.00 | 281 | 28.62 | 0.00 | 0.8658 | −0.1441 |
| TGC | 87 | 8.86 | 0.42 | 84 | 8.55 | 0.38 | 1.0392 | 0.0385 |
| AGA | 60 | 6.11 | 0.76 | 53 | 5.40 | 0.68 | 1.1407 | 0.1316 |

Pearson Chi-squared Test = 5.6672, DF = 3, P-value = 0.129
Permutation Test P-value = 0.07

[0344] haplo.score Haplotypes

| | Hap.Freq | Score | P.X\hat{ }2 | P.Sim |
|---|---|---|---|---|
| ATC | 0.1647 | −1.8903 | 0.0587 | 0.0599 |
| AGC | 0.5464 | −0.0089 | 0.9929 | 0.9960 |
| TGC | 0.1695 | 0.8924 | 0.3722 | 0.3749 |
| AGA | 0.1104 | 1.2311 | 0.2183 | 0.2106 |
| TGA | 0.0053 | 2.2174 | 0.0266 | 0.0105 |

Global Score = 10.7498,
DF = 5,
Global P.X\hat{ }2 = 0.0566,
Global P.Sim = 0.0425

### Example 11

### Haplotype Analysis of the CHGB Locus

[0345] rs454422 and rs236108 are significantly associated at the allele and genotype levels (P<0.05). Moderate LD is observed between 454422 and 236108 (r²=0.474). Chi-squared statistics indicate that haplotypes are significantly associated with breast cancer. Haplotype-specific chi-squared values, odds ratios, and score tests indicate that the TAT haplotype contributes most to this effect, suggesting that individuals who carry this haplotype are at a slightly lower risk of developing breast cancer than individuals with other haplotypes.

[0346] Statistics

[0347] Chi-squared statistics are estimated to assess whether 1) alleles and genotypes are associated with breast cancer status and 2) marker genotype frequencies deviate significantly from Hardy-Weinberg equilibrium (HWE). Haplotype frequencies and relative frequencies are estimated, as well as several statistics (r², D′, and p-value) that gauge the extent and stability of linkage disequilibrium between markers in each region. Chi-squared statistics and score tests are estimated to determine whether reconstructed haplotypes are significantly associated with breast cancer status (P<0.05). P-values are estimated for 1) the full set of reconstructed haplotypes and 2) a reduced set that excludes haplotypes with observed frequencies less than 10. Results are presented by chromosome order.

Results

[0348] Summary Statistics: Alleles and Genotypes

SNP Locations

| SNP.ID | Type | Location |
|---|---|---|
| 236116 | Proximal | 5884335 |
| 454422 | Incident | 5891693 |
| 236108 | Proximal | 5916559 |

[0349] Allele by GYNGroup

| | | Case | Control | Test |
|---|---|---|---|---|
| | N | (N = 508) | (N = 536) | Statistic |
| 236116: T | 1028 | 79% (392) | 79% (420) | Chi-square = 0.08 d.f. = 1 |
| | | | | P = 0.783 |
| 454422: C | 998 | 83% (402) | 76% (393) | Chi-square = 8.06 d.f. = 1 |
| | | | | P = 0.00452 |
| 236108: T | 1016 | 8% (41) | 13% (70) | Chi-square = 6.14 d.f. = 1 |
| | | | | P = 0.0132 |

[0350] Genotype by GYNGroup

| | | Case | Control | Test |
|---|---|---|---|---|
| | N | (N = 254) | (N = 268) | Statistics |
| 236116: CC | 514 | 4% (9) | 3% (9) | Chi-square = 0.22 |
| | | | | d.f. = 2 P = 0.894 |
| CT | | 34% (84) | 36% (96) | |
| TT | | 62% (154) | 61% (162) | |
| 454422: AA | 499 | 3% (8) | 5% (14) | Chi-square = 8.37 |
| | | | | d.f. = 2 P = 0.0152 |
| AC | | 27% (64) | 37% (95) | |
| CC | | 70% (169) | 58% (149) | |
| 236108: CC | 508 | 84% (206) | 75% (198) | Chi-square = 7.04 |
| | | | | d.f. = 2 P = 0.0296 |
| CT | | 14% (35) | 23% (62) | |
| TT | | 1% (3) | 2% (4) | |

[0351] Genotyping QC: Test of Hardy-Weinberg Proportions

All

| | A.freq | D | ChiSq | Pvalue |
|---|---|---|---|---|
| 236116 | 0.790 | −0.00948 | 1.620 | 0.203 |
| 454422 | 0.798 | 0.00356 | 0.240 | 0.624 |
| 236108 | 0.893 | 0.00266 | 0.381 | 0.537 |

[0352] Control

| | A.freq | D | ChiSq | Pvalue |
|---|---|---|---|---|
| 236116 | 0.789 | −0.01320 | 1.6200 | 0.203 |
| 454422 | 0.762 | −0.00209 | 0.0340 | 0.854 |
| 236108 | 0.869 | −0.00150 | 0.0445 | 0.833 |

[0353] Summary Statistics: Linkage Disequilibrium

PHASE Haplotype Frequencies

| | H.freq | H.relfreq |
|---|---|---|
| CCC | 207 | 0.210 |
| TAC | 94 | 0.095 |
| TAT | 106 | 0.107 |
| TCC | 581 | 0.588 |

[0354] Linkage Disequilibrium Between Markers

r²

| | 236116 | 454422 | 236108 |
|---|---|---|---|
| 236116 | 1.0000 | 0.0673 | 0.0319 |
| 454422 | 0.0673 | 1.0000 | 0.4740 |
| 236108 | 0.0319 | 0.4740 | 1.0000 |

[0355] D′

| | 236116 | 454422 | 236108 |
|---|---|---|---|
| 236116 | 1.000 | 0.265 | 0.265 |
| 454422 | 0.265 | 1.000 | 1.000 |
| 236108 | 0.265 | 1.000 | 1.000 |

[0356] D′ P-value

| | 236116 | 454422 | 236108 |
|---|---|---|---|
| 236116 | 1.00e+00 | 3.33e−16 | 2.02e−08 |
| 454422 | 3.33e−16 | 1.00e+00 | 0.00e+00 |
| 236108 | 2.02e−08 | 0.00e+00 | 1.00e+00 |

[0357] Haplotype by GYNGroup

PHASE Haplotypes (All)

| | Case | Case(%) | Case.X\hat{ }2 | Control | Control(%) | Control.X\hat{ }2 | OR | ln.OR |
|---|---|---|---|---|---|---|---|---|
| TAT | 39 | 3.95 | 2.85 | 67 | 6.78 | 2.65 | 0.5649 | −0.5711 |
| TAC | 39 | 3.95 | 0.87 | 55 | 5.57 | 0.81 | 0.6971 | −0.3608 |
| CCC | 99 | 10.02 | 0.01 | 108 | 10.93 | 0.00 | 0.9074 | −0.0972 |
| TCC | 299 | 30.26 | 1.30 | 282 | 28.54 | 1.21 | 1.0864 | 0.0829 |

Pearson Chi-squared Test = 9.7095,
DF = 3,
P-value = 0.02120

[0358] PHASE Haplotypes (Low Frequency Excluded)

| | Case | Case(%) | Case.X\hat{ }2 | Control | Control(%) | Control.X\hat{ }2 | OR | ln.OR |
|---|---|---|---|---|---|---|---|---|
| TAT | 39 | 4.36 | 3.17 | 67 | 7.49 | 3.03 | 0.5630 | −0.5745 |
| CCC | 99 | 11.07 | 0.05 | 108 | 12.08 | 0.05 | 0.9063 | −0.0984 |
| TCC | 299 | 33.45 | 0.79 | 282 | 31.54 | 0.76 | 1.0906 | 0.0867 |

Pearson Chi-squared Test = 7.8414,
DF = 2,
P-value = 0.01983

[0359] haplo.score Haplotypes

| | Hap.Freq | Score | P. X\hat{ }2 | P.Sim |
|---|---|---|---|---|
| TAT | 0.1073 | −2.4492 | 0.0143 | 0.0130 |
| TAC | 0.0951 | −1.3720 | 0.1701 | 0.1880 |
| CCC | 0.2095 | −0.1174 | 0.9065 | 0.9372 |
| TCC | 0.5881 | 2.4468 | 0.0144 | 0.0145 |

[0360] Modifications may be made to the foregoing without departing from the basic aspects of the invention. Although the invention has been described in substantial detail with reference to one or more specific embodiments, those of skill in the art will recognize that changes may be made to the embodiments specifically disclosed in this application, yet these modifications and improvements are within the scope and spirit of the invention, as set forth in the claims which follow. All publications or patent documents cited in this specification are incorporated herein by reference as if each such publication or document was specifically and individually indicated to be incorporated herein by reference.

[0361] Citation of the above publications or documents is not intended as an admission that any of the foregoing is pertinent prior art, nor does it constitute any admission as to the contents or date of these publications or documents. U.S. patents, documents and other publications referenced herein are hereby incorporated by reference.

The application's sequence listing, which the Patent Office published only in electronic form, follows.

SEQUENCE LISTING (1179 sequences)

SEQ ID NO: 1 - DNA, 94400 bp, Homo sapiens
ctaaaaatacaaaaaaattagctgggcacagtggtgaatgcctgtaatcccagctacttgggaggctgaggcaggagaattgcttgaatccgggaggcagaggttgtagtgagccgagattgcagcactgcactccagccagggtgacaaagtgagactccgtctcaaaaaaaaaaaaaaaaaawatacaaaaagtagctgagcgtggtggtgggtgcccataatcccagctagtcrggaggctgaggcaggagaactgtttgaacctgggaggcagaggttgcagtgagctgagatcgtactactgtactccagcctgggctgcagagtgaaactatctcaaaaataagtaaataaaagtaaaatgagttgaggtcttgctctgttgcccagatgggagtgcagtggcacaatcaaggctcactgcagtttcagtctcccaggctcaagcaatcctcccactgcagcctcctgagtagctgggactacaggcatgtaccaccacccactgctaacttatttttcatggagatgggggtctcactatgttgcccaggctgggagtttgttcttgaagaagcagggtagatggtgagtgtccttgttcgtggcacagcaggaactggcatttgagacaggastgctaatcaccatccctctccactcctcccttgattgtcatcacagctcccacgtgggacaagatggtgtcttcggcrcagatgggcttcaacctgcaggctctcctggagcagctcagccaggatgagttgagcaagttcaagtatctgatcacgaccttctccctggcacacgagctccagaagatcccccacaaggaggtagacaaggctgatgggaagcaactggtagaaatcctcaccacccattgtgacagctactgggtggagatggcgagcctccaggtctttgaaaagatgcaccgaatggatctgtctgagagagcaaaggatgaagtcagaggtgagyggaaatcggtccacactgtgtcctaggaggaagcaggcgtcctctccaggactttagaaattcagaaggccaggcgcgctggctcacgcctgtcgtcccagccctttgggaggctgaggcggttggaccacctgagggtcaggagtttgagaccagcctgaccaacatggtgatgaaacagcatctctactaaaaatacaaaaatttgctggacgtggtggcagacacctgtaatcccagctactccgggaggctgaggcaggagaatcacttaaatctaggaggcgggggttgctatgagccgagatcacgccattgcaccccagcctgggcaacaagagcaaaattctgtctcaaaaaaaaaaagaaatggcattgaggcttggagagggactgcttgttctgaatgcaggtgctggatcttcataaaccctggtgtctgtcctggtccttattttctacctacttctttttttttttttttttgtccttttatttttttattttttattttattattattattttttttattatactttaagttttagggtacatgtgcacattgtgcaggttagttacatatgtatacatgtgccatgctggtgcgctgcacccactaactcgtcatctagcattaggtatatctcccaatgctatccctcccccctccccccaccccaccacagtccccagagtgtgatgttccccttcctgtgtccatgtgatctcattgttcaattcccacctatgagtgagaatatgcggtgtttggttttttgttcttgtgatagtttactgagaatgatggtttccaatttcatccatgtccctacaaaggacatgaactcatcattttttatggctgcattgtattccatggtatatatgtgccacattttcttaatccagtctatcattgttggacatttgggttggttccaagtctttgctattgtgaataatgctgcaataaacatacgtgtgcatgtgtctttatagcagcatgatttatagtcatttgggtatatacccagtaatgggatggctgggtcaaatggtatttctagttctagatccctgaggaatccccacaccgacttccacaatggttgaactagtttacagtcccaccaacagtgtgaaagtgttcctatttctccacatcctctccagcacctgttgtttcctgactttttaatgatcgccattctaactggtgtgagatgatatctcatagtggttttgatttgcatttctctgatggccagtgatgatgagcattttttcatgtgttttttggctgcataaatgtcttcttttgagaagtgtctgttcatgtcgttcgcccactttttgatggggttgtttgtttttttcttgtaaattattttctacctatttctatcgctttcaggtatcgtacagttggcctaacatatctgtggatttaaccaatcctagatcaaaaataatgggggcaaagacaattaaaaataacaatacaataaaatgcacatgaactatggttatttaactcttcttgagagaggatctcactctgtcacccaggctggaatttagcagcacgatctcggctcactgcaacctccgcctcccgggttcaagcgattctcctgcctcagcctcccgagtagccgggattacaagcatgtcccaccatgcctggctgattttttttttttttttttttgtattctaaatagagatggggtttcaccatgttagccaggatagtctcgatgtcgtgacctcatgatctgcccgcctcggcctcccaaagtgttgggattacaggcgtgagccaccgcacccagccagcaagtgcatttagaactactctactttctaccccataacttttttttttgtttgtttgagacaagtctcactctgycacccaggatggagtgcagcagcacaatctcagcttattgcaactcccgccccctgggttcaagtgtttctcctgcatcagcctcttgaatagctaggattatacaggcacctgccactgtgcctggctaaattttgtattttaatagagatggggtttcactatgttggccaggctggtcttgaactcctgaccacgtgatcaacccgcctcagcctcccaatgtgctggrattacaggtgtgagccgccatgcccagctacacttttttttgaaacggggtctcgttttcttgctcaggctggagtacaatggggcaatcacagctcactgcagccttgacctcccagacttgagcaatcctaccactatggcctcccaccacacctcgctcattcttgtatatatatatatttttgtagagatagggtttcaccatgttgcccaggctggtctcgaacttctgtgggctcaaccgatcctcctgccttggcttcccacagtcctgggatcagaaacatgagccacagtgcctggccagtgcagctttatttacagtaaccaagatatagagtcagtctaagtgaccatcagtggatgaataaaaaatgtgcccgttgggtaccctgcctactgcctgggttatgagattgttgggaccccaagccttaaaaaggaaacatggtaggccgggcacagtggctcacgcctgtaatcacagcactttgggaggccaaggcgggtggatcacttgaggccaggagtttgagaccagtcaggccaatgtggtgaaaccctgtctctactaaaaatataaaaaaatcagccgggcgtggtggcacactcctgtagtcccagctacttgggaggctgaggcaggaggattgcttgaaccagagagtcagaggttgcagtgagccaagatcgtgccactgcgctccagcctgggtgacagcaagactccatctcaaraaaaaaaaacaaacaaacatggtattaattacacaatggaatactcctcaaccttaaggaactcctatctttttatttaaaaattgccagttttatttcagctagagatcactttttagcataatgtttcctgtctttaacaatgggtgagggtttttttttttttttttttggtttggtttggattttggttttgcttttgagtcgaagtttcactcttgtctcccaggctagagtgcaatggcgcgatctcggctcactgtgacctcctcctcccaggtttaagtgattctcctgcctcagcctccagagtagctgggattacaggcgcctaccaccatgcccgctaatttttgtattttagtagagacagggttttaccatgttgaccagactggtctcgaactcccgacctcaggtgatctgcccacctcagcctcccagagtgctgggattacaggtgtgagcaaccatgcccggccaagggtttttaactttagctgacctccggaggttacaagtttgaaaacggcaggaggaaacccagagagttgtaaacttacgaaggtctgggctctgaaaaagatacaaattttctttccatgccaatagcrctcacacagacatggtgaatgttcctgaaacccgccggactttctgtaagaagtgtggcaagcaccacccccacaaagtgacacaaggcaaggattcttggtatgcccaggggaagtagtgttatgacaggaagcagagtggctatggtgggcagactaagccgattttccggaaaaaggctaaaactacaaagaagattgtgctaaggcttgagtgccttgagcccaactgcagatctaagaatgctggctattaaaagatacaagcagccaagcgcggtggctcacgcctgtaatcccaacactttgggaggccgaggtgggcggatcacaaggtcaggagtctgagaccagcctggccaaaatggtgaaaccccatctctactaaaaatacaaaacttagctgggcatggtggtgtatgcctatagtcccagctactcaggaagctgaggcaggagaatcgcttgaacctgggaggcagaggttgcagtgagccaagattgtgccactccagcctgggcaacagagtgacactctgtctcaaaaaaaaaagatgcaagcattttgaactggaaggagataagagaaaggaacaagtgatccagttctaartgtcatcttttcttttatgaaggcaataaaatcttgagcttatggtaaaatgcaaaattttccccccttctcctttttcagaagcagctttgaaatcctttaataaaaggaarcctctatcattaggtaagttacctcatttataacttttattcttcatgtgagatctggggactcgggcctttgttttaaggagaatgtgctgagcactaagaatgcaaagaaatgccggacttagcatccctgctcccagggcggagctggtctcgcaggtgcgtagcagtaagacctgggaagctgaaacacgatcgcgtttgttggaaatctataaatacatacaaagcggggaagggtaagcttggcctttgaatctggataaggtagagacttttcttttttgagatggaggcttgctctgtcacctaggctgaagtgcagtggtacgacctcggctgactgcaacctctacctcctgggttcaagcagttctcctgcctcagcctctagaatagctgggattacaggtacctgccaccaggcccggctaattttttgtggtgtttgtagagatggggtttcaccatgatggccaggctggtcttgaactcctgacctcaagtgatctgcccacctcagcgtcccaaaatgctgggattatgggcatgagccaccaccacacccggttttgtttttttttttttttttttttttttttttttttttttgaaacagggcttcactctgtcacttaggctggagtggtgcaatcatggttcactgcagccttgacctcccaagctctggtgatcctcctgcctcagcctcctgagtagctgggaccacaggcacttgccaccatgcctggctaatttttttcactttttgtagagacagggtcttgctatgttgcccaggctggcctcraattactaaactcaatcagtcctcctgcctcaccctcccaaactgctggggtacaggtgtgagccatgacacctggcccttaccagctacttatatcctgaagattattattattttttttttttttgagatagagtctctctctgttgcccaggctggagtgcagtggcgtgatctcggctcactgcaagctccgcctcccgggttcatgccattctcctgcctcagcctcccgagtagctgggactacaggcgcccaccaccacgcctggctaatttttttgtgtttttagtagagacggggtttcaccgtgttagccaggatggtctcgatctcctgaccttgtgatccgcccgcctcggcctcccaaagtgctgggattacaggcgtgagccaccgcgcccggcccctgaagattgtgttttgagatggggtcttgctgtgttgctccggcttgattgcagtggcacagtcatagctcattgcagcctcaaccttccaggctccagagatcctcttacctcagcctcctgagtagctgggactacaggtgtgcactgccacacctgactaatatttgtatttttggtagggacagtttcactatgttgccagatatggtgtcaaactcctggtctcaagtgatcctcccaccttggcctcccaaagtgctgggattacagacatgattcaccacacctggccatgaagactttttttttttggacaaagtctcactctgttgcccaggatggaatgcagtggcatgatctcagctcactgcaacctctgacctccgcctcccggttcaagtgattctcttgcctcagcctcccgagtagctgggattataggtgtctgccaccaagcccagctaatttttgtaattttagtagagatggggtttcaccatgttggccaggctggtcttgaactcctgacctcgtgatccacgtgcctcagcctcccaaagtgttgggattacaggtgtgagtcactgcgcctggtctcatgaagaccttttttgagacagagtcttgctctgtcacccaggctggagtgcagtggtacaatctcactgcagcctccgcctcccaggttcaagtgattctcctgccttagcctcccaagtagctgggattacaggcgcctaccaccacgtctggctaatttttgtatttttagtagagacagggtttcaccatgttggccaggctggtctcaaactgctgacctcaaatgaactgtctgcctcagcctcacaaagtactgggattacaggcatgagccacctcacctggtggtgaagactctaaaggctcttctcagatcagcctttgtcctgaatttcacatgcccgtgtccagttccctccccagcatcttttcaggagttccatggactcacctcttcattatccagggttaagctgcagatattgttattaggattccaccttgttctctctctttttttttttttttttgatacggagtctcgcttgctcttttgccaggctgaagtgcagtggagcgatcttggctcactgcaatctccgcctcctgggttcaagcaattcccttgcctcagcctcgcaagtagctgggacttacaggtaacacaccaccatgcccggctaattttttgttttagtagagacggggcttcaccatgttggccgggatggtctcgatctcctgacctcatgatccgcctgccttggcctcccaaagtgttgggttacaggcatgagccaccatgcccggctgattccaccttgttcttacattctttcccagttcattttaaatttatctacctcatcagaaactagggggttaggcctggcaggcagatcacctgaggttgggagttcgagaccagcctgaccaacgtagagaaaccctgtctgtactaaaaatacaaaattagccaggtatggtggcacattcctgtaatcccagctactccggaggccgaggcaggagaatcacttgaacccaggaggcggaggttgcagtgagccgacatcacaccattgcattccagcctgggcaacaagagcaaaactacatctcaaaaaaaaagaaaaactaggcagttaatcctcaaagcctttccagtggccttatgcgtgagtagtttgtgtgtgtgtgtgtgtgtgtgtgtgtgtgtgtgtgtctttcacaccatgtgttctgaactacttaggaattctcaccagaaaggcacataaacctgggatcatggcctaatgtactttcacttttacatccagtaccttatcaacgtcctttttagtacctaatctaggcttcactactgagactcaggggtccaacttgagccatcttggagtcccactgccagcacagcaacaggcctgtaatgccgccctttttctccagggataacacggaaagaacgaccacctctagacgtggacgaaatgctggagcgcttcaaaacagaagcacaaggtgggtgtcaggacctccaatgttggagtcagctgaggaagccccccgttcttgctgctatctcctgttcctttgaagaaccccatctctctccaatcttttcctccactattcttaatgtgcccactgtctcctggagaatgccaacctcccttccrtaagaatagagggaagaacgaacgttgcagagaattagaactcagtttgtagaaagttaggagcacagcgcagagagtttttgtttttgtttttgttttgagacagtttctctgttggccaggttggaatgcaatggcgcgatctcggctcactgtaacctccacctcccaggttcaagcgattctcctgattctcctgactcagcctcctgagtagctgggattataggcacctgccaccacacccagctaatttttttttttttttttgagacgaagtcttgttcttgtcacccaggctggagtatagtggcaccatccctgttcactgcaacctccgcctcccagattcaagtgattgtcctgtctcagcctcctgagtagctgggactacaggtgcatgccaccacgcccagctaatttttttttgtacttttagtagagacaggtttcaccatctcattcagggtggtctcaaactcctgacctcaagagatctgctccacccacccccaagtctcccgaagtgctgggattacaggcgagagccaccgtacccggccttctttaaattatttaaaagttgacaggtggccaggtgtggtggctctcacctataatctcccagcactttgggaggctgaggcgggtggatcaagagatcgagaccatcctggccaacatggtgaaacccaactctactaaaaacacaaaaattagccgggtgtggtggcacccgcctgtagtcccagctactcaggaggctgaggcaggagaatcgcttgaacccgggaggtggaggttgcagtgagccaagattgtgccactgcactccagcctggcaacagtgcgagactccatcttaaaaaaaaaaaaaaaaaattgacaggcataaatgtatttatggtacattgctcagacaactttaatataaacaacttacagagaaaattgagtcttttgggtaggtgacttgcctgagctgactttgtgataggttttttctgttttttttgtttttgaaatagagtctcactctgtcatgcaggctggagtgcagtggccccatcttggctcactgcaatctctgcctcctgggttcaaggggtcttcctgccacagcctccccaggtgctgggactataggtgcccaccactatgcctggctaacttttgtgtttttagtacagatggggtttcaacagggtagccaggttggtctagaactcctgacctcaagtgatccacctacctcggtctcctaaagtgctgggattacagctgtgaaccaccgcacctagcctgtgatcagtttcagatcagccttgcttactccacattccctcttatcttcctggtagcatttttgttttttcttgagaaagagttttgcccttgtcgcccaggctagagtgcaatggtgtgatctcggctcgccacaacctccacctcccaggttcaagtgattctgcctcagcctcccgagtagctgggatcataggcgcccaccaccacatctggctaatttttgcatttgttagttttatttttagtagacagggtttcaccatgttgggcaggctggtcttgaactcctgacctcaggtgatccacccacttcggcctcccaaagtgctgggattacaggcatgagccaccgtacctagcccacattgacttttgatacagcaagtatttcttgctatggctctgtataatagaggtgagtaacttggttgaaggaattgtttgccctgttcatctctctagacacggccaatgtcattcctggcacacaatctttttttttcttgagatggagtctcactctgttgcccagactggagtgcagtggtgcaatcttggcccactgcaacctctgctacccaggttcaagcgattctcctgcctcagcctcccaaatagctgggagtacaggtgtgtgccaccacgcccagctaattttttgtattttagtagagacagggtttcaccgtgttagtcaggatggtctggatctcctaacctcgtgatccgtccgcctcagcctcccaaagtgctgggatgacaggcgtgagccactgtgcccagcctagcacacaatcttgacaaagaatttcggtgcgacttggggtactgtggtgcctgctctatcatcatgcttcagcaggaaatgtgggtgaatagtgcctggtggcatggcaggtaaagaaatgttttgttttgtttttttttttgagacagtcttgctctgtcacccaagctggagtgcagtggcgcaatctcggctcactgcaagctccatctcccgggttcacgccattctgcctcagcctccccagtagctgggactacaggcgcccgccacacgcccggctaattttttgtatttgtagtagagacagggtttcaccgtgttagccaggatggtctcgatctcctgaccttatgatccacccgccttggcctcccaaagtgctgggattacaggcgtgagccaccgcgcccagccgcgggtaaagaaatttatgaagacaatcgtaggtaaaggaaggcagatttattggagaaagtaggaaaagacattggcagagagaccccagcgggcaggttgtcatgagtagctcactgccaggagaccaaagcttcctgcagattttatagaatagggcttgggctgattgataatgtcaacagggggtttaacttgcggtcttctttcagcagaagtgtttgataaactgaggcgtttcatggcaaacagggagtttgtgagctctgtgtgtgatctggccaggaaggccaaacatcttgggccgtatctcctggaccataaaagcagacctggcccagtgcagtggttcatgcctgcaatcccagcactttgggaggctgaggtgggtggatcatctgaggtcagcagttttagactggcctggccaacatggcgaaaccccatctctactaaaaatacaaaaattagcctagacgcagtggcacatgcctgtaattccagttacttgggaagctgaggcaggagaatcgcttgaacccgggaggcggaggttgcagtgagctgagattgcgccactgcactccagcctgggcaacagagtgagactgtctcaaacagacctatagctgacctgtttcctcttgtttgtatgccctgaaccatggaggaaagcttatttatttattttattgagatggagtcttgctctgttgcccagggtggagtgcagtagtgcgatctcttactacaacctccatctcccaggttcaagcaattctcgagcctcttggcctcccaagtagctgagattacaggcatgcgccaccacgcctggctaatttttgcatttttagtagagatggggtttctgtgttggccaggctggtctcgaactcctgagctcaagtgatccaccccacctcagcctcccaaagttctgggattataggcatgagccaccacacctggccggaaaacacatttgtagcttatttgctttatctgatcccgtgccccccctcccccccgccccatcagcctgcctccttttctctaattgggactccacaggaaatacacctgattttgtgtcaatctcacatgagtttgtattttgtagcgtttacagaaacgaaaggaaatgtcatctgcctgggtaaagaagtctttaaaggaaaaaagccaggtctgtaccatatcttcctgcagggagcttgggatcagatttctctttataaacttgaagtcctcttaactttcctatgtaacacaaagcatttatttatgtatgtatgtatcgagacggagttttgctcttgttgcccaggctggagtgccgtggcgtgatctcgactcactgcaacctccgcctcccaggttcaagcaattctcctgcctcagcctcccgagtagctgggattacaggcatgcgccaccatgactggctaattttttatttttagtagagacaaggtttcttcatgttggtcaggctggtgttgaactcccaatgtcaggtgatctgcctgcctcgacctcccaaagggctgggattacaggcatgagccactgtgcccggccaacacaaggcattttgttattttggttttccctatgggtaactgattgcatcctctctcccttccctcctcaccaatgataaagacaaagacaataggtgcaggtatatattgaagacgaagttccgggagatgtggaagagctggcctggagatagcaaagaggtccaggttatggctgagagatacaagatgctgatcccattcagcaaccccagggtgcttcccgggcccttctcatacacggtggtgctgtatggtcctgcaggccttgggaaaaccacgctggcccagaaactaatgctagactgggcagaggacaacctcatccacaaattcaaatatgcgttctacctcagctgcagggagctcagccgcctgggcccgtgcagttttgcagagctggtcttcagggactggcctgaattgcaggatgacattccacacatcctagcccaagcacggaaaatcttgttcgtgattgacggctttgatgagctgggagccgcacctggggcgctgatcgaggacatctgcggggactgggagaagaagaagccggtgcccgtcctcctggggagtttgctgaacagggtgatgttacccaaggccgccctgctggtcaccacgcggcccagggccctgagggacctccggatcctggcggaggagccgatctacataagggtggagggcttcctggaggaggacaggagggcctatttcctgagacactttggagacgaggaccaagccatgcgtgcctttgagctaatgaggagcaacgcggccctgttccagctgggctcggcccccgcggtgtgctggatcgtgtgcacgactctgaagctgcagatggagaagggggaggacccggtccccacctgcctcacccgcacggggctgttcctgcgtttcctctgcagccggttcccgcagggcgcacagctgcggggcgcgctgcggacgctgagcctcctggccgcgcagggcctgtgggcgcagacgtccgtgcttcaccgagaggayctggaaaggctcggggtgcaggagtccgacctccgtctgttcctggacggagacatcctccgccaggacagagtctccaaaggctgctactccttcatccacctcagcttccagcagtttctcactgccctgttctacaccctggagaaggaggaggaagaggatagggacggccacacctgggacattggggacgtacagaagctgctttccggagtagaaagactcaggaaccccgacctgatccaagcaggctactactcctttggcctcgctaacgagaagagagccaaggagttggaggccacttttggctgccggatgtcaccggacatcaaacaggaattgctgcgatgcgacataagttgtaagggtggacattcaacggtgacagacctgcaggagctcctcggctgtctgtacgagtctcaggaggaggagctggtgaaggaggtgatggctcagttcaaagaaatatccctgcacttaaatgcagtagacgttgtgccatcttcattctgcgtcaagcactgtcgaaacctgcagaaaatgtcactgcaggtaataaaggagaatctcccggagaatgtcactgcgtctgaatcagacgccgaggttgagaggtgagaaccgtttcactctaccagtcgttccatctttagcctcatcccatgcccccttaggaagaggccagagcctcctatgcactgtggcttagggtcaggaattccctcttgttggactctttgtttgtttttgttttgagatggagtcttgctctgtcgctcaggctggagcgcagtggcgcgatcttggctccctgcaacctccgcctcccgggttcaagtgattcttctgcctcagcctcctgagtagctgggactacaggcgcctgccaccttgcccggctaatttttatattttcattagagacgggatctcagcatgttggccagtctggtcttgaactccgcctgacctcaggtgatccacctgcctcagcctccaaagtgggattacaggcatgattcaccatgcccggcccaaatatatttttttaagacagggtcttgctgtgttgctcaggctggagtacagtggtgaaatcagctcactgcatcctcaaacttctgggttcaagtgatgttcctgagtacctgggatgacaggtattaagtgtgcaccatcatgtccagctaacttaagtgggggtttttttttgtgtttttttttttttttttttttttggaaagacaaaatctcactatgttgtccaggctggtcttgaactcccaaagcactgagattacaggcatgagttaccacacgccctgcctgaatatttcttattgatatgtatagatatgtatattcccaatctttttttttttttttgagacggagtttcactctttttcccaggtcggagtgaagtggctcgatctcggctcactgcaacctccgccccaccaggttcaatgattctcctgcctcagcctcatgagtagctgggattacagccacccacgaccatgcccagctaatttttgtacttttagtagagacggggtttcaccatgttggccaggcaggtctcgaactcccgacctcaggtgatccacccgcctcagcctcacaaagtgctaggattataggcgtgagtcaccgtgcccggtctatattctctatcttttatcaatgatgtgcttagcattttaacttatttttaccctctattggatttttgtctaagaagaataggttctttctcctgtgatgcttcttgggtgttgagttgtctgatggtggtgctaataagtgattacatggtccagctttcaattgtactcatttgtcaggggtatatgcccagagaaaccctaaatacttcagccgtgatggacacacatttggtgtaaccctttcttctcttccctatagatcccaggatgatcagcacatgcttcctttctggacggacctttgttccatatttggatcaaataaggatctgatgggtctagcaatcaatgatagctttctcagtgcctccctagtaaggatcctgtgtgaacaaatagcctctgacacctgtcatctccagagagtggtgtaagtagaaactaattcatgaactcaaatccttagggtatgaaaatggtacaatgttaacatcggagcaatattcagattcctgtactagactcttaagtgctcgagacacagggaattgagagagtcctgtccttaaatttattttgtgggataatcgtataaagtaatttctaggggctgggcatggtggttcacacttgtaattccaacacttcgggaggccgaggcagacagatcacttgaggtcaggagttcgagaccagcctggccaacgtgacaaaaccctgcctctactaaaaatacaaaaattatccaggcgtggtggcaggcacctgtaatatcagctacttgggaggctgaggcaggagaattacttgaacccaggaggcggaggttgcagtgaaccaagatcctgccactggactccagtctgagtgacagagcgaractgcgtctcaaaaaaaaaaaaaaaaaaaaagaaaaagaaaaaaagggccgggcacaatggctcacgcctgtagtcccagcactttgggggcccaaggtggggggatcacttgaggtcaggagttcaagaccagcctggccaagatggtgcaagaccctgtctctacgaaaaatacaaaaatttgccaggtgtcgtggcaggtgcctataatcccagctactccggatgctgagggtaggagtcgcttgaatccgggaggcagagtttgctttgcagtgagccgagatcgcgccactgcactccagcctgggcaacagagtgagactccatctcaaagaaaaaaaaaatctgtaaagatggacaaaaatttaaacatggaaaaaatagttcctaaagtttaaatatatcgagcccctggtttccatttaagtacgatacaggtgtacacactaaagatttcactttcgttctcttttccctaggttcaaaaacatttccccagctgatgctcatcggaacctctgcctagctcttcgaggtcacaagactgtaacgtatctgacccttcaaggcaatgaccaggatgatatgtttcccgcattgtgtgaggtcttgagacatccagaatgtaacctgcgatatctcgggtatatctcttaatcattaaaatccttcatcatacaaacataagctaccacaagcttatgtggcaattttgtgtaaataagaaaaagttcgttattctgactagaaacagtactaagggcagatgacccaggatgcagcatgggctgaacttgagtttcyacttgccttgaacagtaaacaccctggacaaccatacgtgaggaccctgaatccaaagaaactcccagaatctttatcatctttttttttttttttatgragtcttgctctgttgcccaggccaaagtgcaatggcacgatcttggctcactgcaacctctgtctcctgggttcaagtaattctgctgcctcagcctcccaagttgctgggattacaggcacccgccaccacgcccggctaatttttgtgcatttagtggagctggtttcgccacattgccaggctggtctcgaactcatgacctcaggtgacctgccctcctcaggctcccaaagtgctgggattataggcatgagccaccatgcccagccagagtccttatgttttggttttggttttggttttttctttttcttttttctttttgagatggagtctcgctctgtcacccaggctggagtgcgttggtatgatctcaggtcactgcagcctccacctcccaggttcaagtgattctcctgcctcagcctcctgagtagctgggattacaggtgcacaccaccacacctggttaatttttgtattattagtagagatggagttttaccacattggccaggctggtctcgaactcatgacctcaggtgatctacccccccacccccaccccaccccgccgtcggcctcccaaagtgaggcatgagccaccgtgcccagcccagaatctttatcttctatcagagatcattcactcatggttcatgcttctcctgtatgatgattcagaataccagctattgacatttttcaagcaagaacccttcaggaacatcaagttgccccttttctgttagtcctctggtttgagagctctccccttgggaagctgtccagtggctgcccaggcgatgagaacctacatgcatcatggggttccatgaagcctcacttggccacactggtgtagtaggtggtcattggcctcaaattattgccctgggccaggcgcagtggctcacgcctgggaggccgaggtgggtggatcacttgaggtcaggagttcaagaccggcctggtcaacatggtgaaactctgtctctactaataatacaaaaattagctgggcatgttggcgcacgcctgtagtcccagctactcaggaggctgaggcaggagcatcatttgaacctgagaggcggaggttgcagtgagctgagatcacaccaccgcactccagtctgggcaacagtgtgagactgtctcaaaaaaaaaaaaaaaaatcttggctgggtgcggtagctcatgcctgtaatcccagcactttgggaggccaaggcaggtggatcacaaggtcaggagttcaagaccagcctggccaacatggtgaaaccccacgtctactaaaaatacaaaaacattagctgggcatggtggcgcgtgcctgtaatcccagctactcatggaggctgatgcaagagaattgcttgaacctaggaggcagaggtagcagtgagccaagatcacgccattgcactccagcctgggcaacagagcaaaactccatctcgaggacagaaaaaaaattgattgctctggctctactgatacaatcttaggctgcttaatgggatcttagttgaataggatgctgtacatcttacaggtattggaaggttgaatgaaaccaagcccatgcattcaatagtggctgctatcattactaaccgttgcaattaccctcttttctttttgcctgagaataatgggatgcagggtgagggggaatattgggtgaattaaagatttgggtcactaatttctttctttttttctcaagatatagtcttgctctgtctcctaggctggagtgcagtgccacaatcttggttcactgcaacctctgcctcccgggttcaagtgattcttctccgtcaacctcccaagtagctgggattacaggcacccacctgtatttttgtatttctagtattttgtatttctagtagagacagggttacgccatgctggtggccagggtggtctcaaactcctgacctcgggcaatccaccacacccagctaatttttggtatatttagtagagccggggtttcaccgtgttggctgggctggtctcgaactcctgacctcaagtgacatccatcttccaaaatgctgggattacagccatgtgccaccacgcccagctaattcttgtatttttaggagaaatggggtttcatcatgttgttccggctggtcttaaactcctggcctcatgatccacctgccttggcctgccaaagtcctgggattacaggcatgagccactgtgcccagccactcatttcttatgaatttattctaacacattttccggatgaacagggcaccttgaaacataggttagtgggctgggtatggtggctcctgcctgtaatcccagtactttgggaggcctaggctggtgtatcgcttgaagtcaggagttttttgttttgagacggagtcttgctctgtcgcccaggctagagtgcagtggagtgatctcggcttactgcaacctccgcctcctgggttcaagtgattctcttgcctcagcctcctgagtagctgggactacaggcacgtgtcgccacgcccatctaacttttgtatgtttagtagagccggggtttcaccatgttggccaggatggtctcaaactcctgacctcctgatctgcccacctcggcctcccaaagtgctgggattacaggcatgagccattgccccggccaaagttaggagtttgagaccagcctggccaacatggtaaaaccccatctctactaaaaaatacaaaaattagccaggcaagatggcatttgcctgtaatcccagctactcaggaggctgaggcgggagaatctcttgaatctgggaggcagaggttgctgtgagctgagatcgcgccactacactccagccagggcgacagagcataaataactccctttcaaaaaaccaaacaatgaaacataggttagcggagtctgcatccaacattagagtcagattgactaagttctgtatttccagctgattcctgggcgatgttggtgccactggtctgaccaccctttgacaactgctgctccagataattcaagtcggggtataacacaaccagtgagatgtaaaccaaagacgattccacggttagattctcaagaatgacttgttctgccgggcgcggtggctcacgcctgtcatcccagcactctgggaggccgaggtgggcagatcacctgagattgggagtttgagaccagcctgaccaacatggagagacccccacctctactgaaaatacaaaattagctgggcatgktggtgcatggtgcatgcctgcagtcccagctactcgggaggctgaggcaggagaatcacttgaacccaggaggcggaggttgctgtgagccgagattgcrccacctgggcaacaagagtgagactcagtctcaaaaaaaaaaaaaaaatgacgtggtcctatttctcccacaggttggtgtcttgttccgctaccactcagcagtgggctgatctctccttggcccttgaagtcaaccagtccctgacgtgcgtaaacctctccgacaatgagcttctggatgagggtgctaagttgctgtacacaactttgagacaccccaagtgctttctgcagaggttgtcgtaagtctctcctctcttmcagagcagctgtgctttcgatctggggccacagacgagcaatggtcatgcctgacttggctgtatggaacctctcgctgatgtgaacacctgttcccatgtttagatccaggccgatggcctgtgaattttgttcttctctcattcctattccttcataggatcaccagtgcatgatagaaggtggggagttcacaagaaggggcttttggatgctggcacttgtggagctagccgggaaggttgaagttggacmtgtcaaccgtgttgccatttgtgattcttttgtaggttggaaaactgtcaccttacagaagccaattgcaaggaccttgctgctgtgttggttgtcagccgggagctgacacacctgtgcttggccaagaaccccattgggaatacaggggtgaagtttctgtgtgagggcttgaggtaccccgagtgtaaactgcagaccttggtgtaagtccgtgctggctgcctgtgtgcgtgggtgtatatgcacacgccccccacctccgggtttgagtagggtggttatgagaacacttaattcctctaaaagttccaagcatgatgctaatgacaactggtaagacctgggtagatgatggtaggaaaaaagtataagtagtagtagagtagtagtaatattctatagggatttggggaatgtagctggttttcgggttttttttttcctctttatgtatgtatgtattttagagatgggatctcgccgtgttgcctaggctggtctcaaactcctgagctcaagagatctgcctgccttggcctcccaaagtgctagaattacaggcatgagccatgtcaccccatgctgtgttttctcttaatctgtgttcttagaactataactgtaacataaattgcaygcaattggttgtaaatggaattcatttacttattttttaatgaatgatttgcaaatcaggtagtcttctgggccagtgtacgctcagactcccaatggaagctattggaagctacatgctcaatgtgatcctcctkttaatactaaaatcacaggacacgtggcctggcatagtggctcacgcctataatcccatcaccttgggaggccgaagcaaggcagatcccttgagggcaggagttcaagaccagcctgcccaacatggtgaaacattgtctctctactaaaaatacaaaaattagtcacgcatggtgggacatgcctgtaatcccagttactcaggaggctaaggcaggagaatcacttgaacttsggaggtggaggttgcagtgagctgagatggcaccactgaagtccagtctggccaatagagcaagactctctcaaaaaaaaaaaattataggacaaatctttagaaaggaattggggcctggcatggtggctcatgcctgtaatctcagcactttaggaggcgggcagaacacctgaggtcaggagtttgagaccagcctggctgatgcagtgaaaccctgtctctactaaaaatacaaaaattagctaggcgtggtggtatggtcctgtaatcccagctacttgggaggctgaggcaggagaatcgcttgaagtcgggaggttgcagtgagccgagatcgtgccagcctgggtgacagaacgagattgtctcaaaaaaaaaaaaaaattgtatctgcactgatggtttctgttcagagattcgattttatgttaacatctctggtattttttttttttttttttaagatggagttttactcttgcccaygctggcaatggcatgatctaggctcactgcaacctccggcttcaaggaggttgattctcctgcctcagcctcctgagtagctgggattacaggcactcaccaccacgccgggctaatttttatatttttagtagagatgggatttcaccatgttggccaggttggtctcgaactgacctcatgatccgcccgcctcagccttccaaagtgctaggatttacaggcatgagccactgcgtccagccatacatatctctggtattctttgtctctaacatcacctccaacagttaggaactgtcctcttcctatgaagtaactaatctaggatatgtacctggcatctgaaaactacccacttaaatttaatgacatattcagttcatggctggagacgatgagtagaaggaaaggattcttcccacacccactatatctaggccctgaaacaytaaaaaagaagtcccacaagcagtgagatgtcaccgactcactaactgtatcttcaaatgaatgtctagtttttttggttgtgtgtgtgtgtggtgtgtggtgtgtgtggtatttttttgggggggggggggttttcttttttttttttttttggttttttttttttgatagtcttgctctgtcgcccaggctggaatgcagtggctccatctcagctcactgcaacctccacctcctgagttcaggtgtgattctcctgcctcagcctcccagggattaaggtgcatgccaccaygcccagctaacttctttatttttagtagagacgagttttcaccatgttggtcaagctggtctcgaattcctgacctcaggtgatccacccacctcagcctcccaaagtgctgggattacaggtgtgagccaccgtgccggccccctcaattcaactttttgatccatgcccctattttgctaagttgtcaacttccctttagtcttatgtgggttttcctccattacagtcatggaagtttctagaaggccgggtagggtctttgagaggccgaggcaggtggatcatgaggtcaggagttcaagaccagcctggccaacatggtgaaaccctgtctttactaaaaatacaaaaattagccaggcgtggtgtcggagcctgtaatcccagcttacttgggagggtgaggcagagaattgcttgaacctgggaggcggaagttgcagtgagctgagattgtgccactgtactccagcctgggtgtcagagcgagactgtctcaaaaaaaaaaaaaaaaaagtttctatacattcataaagtttcaagatttgggggtgtgttttcacttctccatcgtcatggactccaatctgccatctatttccaaggcccttccaggtcctgtgtccctcagctagtggtatgcttcacttgggacccagagatacatgggcattatagttcaaattataattaagtttagaactctattgagacagaagaaagaaaacagagctaaggtgaaatatctctgataatctgtgttggttaatatctaggatcctagtaccagatatgttggagtgtgagctggtgtcttctgcctgtaagacactacctctctagcaactgaatttagcaaatacaatcgtaatcccagcaygttagggaggccagggtgggcagatcatctgaggtcgggagttcaagaccagcctggccaacatggggaaaccctgtctctactaaaaatacaaaacttagctgggtgtggtggcacgcgcatgtgtgtacacacacacacccccctgtaatcccagctactcggaaggctggggcacaagaatcgcgtgaamccaggaggcggaggttgaagtgagccaccgtgccagctgagaatcctttttacttctccaacttctgttggccacctgcattccttggcttgtggcccttcctccaacttcrgcagagcatcttcaaacgttgccctggctcccttatcacgtcacctcctgctggctttgactctcagctccctcttatgaggatccctgtgattgctggacctacccaaataaaccaggatataaaccatcttaagatgctcagtcacctctacgaggtcccttttgctcgcaggtgccaggagttgggacttggacatctttaggggaggccattcttctgtccaccacaccaccccatgattccatttccatgtcaccactgtctctaagtgtgtctaacccayggctcaagagtcaaaggtgcatcacagcagtgagaactcacaggttcgggtttgctttcttcctgtggttgatttctaggctttggaactgcgacataactagcgatggctgctgcgatctcacaaagcttctccaagaaaaatcaagcctgttgtgtttggatctggggctgaatcacataggagttaagggaatgaagttcctgtgtgaggctttgaggaaaccactgtgcaacttgagatgtctgtggtgagttaacttataagttcaacttcctatacttacaccttactgaatctgtggctagtgtaaaataatcagtgaagccgacttcccaagttatataattgagaggacctttatagagtcgatcgagcatttactaggatggttaaaggaataagttctagtctatgtctaagtttttgtttttttttttcttgaagttttgctcttgtcacataggctggagtgcagtggcgtgatcttggctcactgcaacctccgcctcccaggttcaagcaattctcttgcttcagcttcccgagtagctgggattacaggcgcccgccaccatgcccagctaattcttgtatttttagtagagacagggtttcgccatgttgaaggttcatctcaaactcctgacctcaggtgatccgcccatctcggcctcccaaagtgctgggattacaggcgtgagccactgcgccaggccctatgtctaagttctagtctgtgtcatgcaaagaacacctgtgaaattttaaggatacagtgcctcaagccattcagccaaaagccactgcccagcaccccacattcagagaggtgggaattgggccaggcacagtggctcatacctgtaatcccagcacttcgggaggccgaagcgggcggatcacttaaggtcaggagctcaagaccagcctggccaacttgaaactccatctctactaaaatataaaaattagccgagcatagtagtgggtgcctcttttttttttttttttttttttgagatagtttcactcttgttgcccaggctgtagtgtaatggcgcgatctcagctcactgcaacctccacctcctgggttcaagtgattctcctgccttagcctcccacatagctgcaaataaacaggcatgtgccaccatgcctggctaattttgtatttttagtatagacggggtttctccatgttggtcaggctggtctcgacctccggacctcaggtgagagccaccgtgcccagccagtaggtgcctttaatcccagctacttgggaggctgaggcaggagaatcacttgaaccctggaggcagaggttgcagtgagctgagatcctgtcactacactccatcctgggctacaagagcaagactccatctcaggaaaaaataaaaaagaggtaggaattagatatcgtgccagaaaatgctggctctatcagcaggtgagtggtctcaacttggctatcttacaaatmccttgtgagttagctacaatcagatgcacttgaacctggaatcctatctgggaggcaatcttaaaagaatttgactcgggatgggcaaggtggctcatgcctgtaatcctggcattttgggagtccaaggcaggtagattgcttgaggccaagaatttaaaaacagcctggccaacacaatgaagccctgtctctactgaaagtacaaaaatccgctgagcatggctgtgtacctctgctcccagttactcaggaggctgaggtgggaggatcacttgagcctgggaggaagaagttacagcgaattgagatcacgtcacctcactccagcctgggtgacagtgagatcctgtctcaaaaaaaaaaaaaaaacaaaaaaaacaaaggcgcctttttaatcactcactgacacgtgtagaggagcaaaaagtttgagttgctggttggcccaggaggtcaaggctgcagtgagccaagatggcgttaccacactccagcctgggcaaccgagtgagaccgtgtttcaaaaaataaagtggcagggtgcagtggctcatgcctgtaattccagcactttgggaggccgaggcaggtggatcacctaaggtcaggagttcgtagaccagcctgtctctactaaagagacaggtgaaaccctgtctctctaaaaccacaaaaatcaggcrggcatggtggcacatagctataatctcatctacttggaggcacgagaactgcttgaatccaggaggcagaggctacagtgagccgagatcatgccacagcactccagccctggcgagagagcaagactgtctcaaagaataacttcaaagatggaagttatttaacctctctgctcaaaagcctcagtgcttccctatgtcaatccaggtaaaatcctatattgacgatggcttcagggtcttctgtgagctggccactgcttacctatgacctcatcttgacaatcctccctgtctcactcatgcccgctgcctggatgttctattttacgtgtcagtcacatgtatcttcagggcctctgcacaagctatttctctgcctggagaactcccccccgagctctatgactcggtctcttcaccccctcacctccaaccattgtagccagaacccccagttattccctgtaccccttgcccttcagaacccctcatcgcctccatattttcctgttagcagatgagccctgagggcggagacgttttgtttgttttttgagaccggagtctcactctgtcacccaggctggagtgcaatggcgcgatctcggctcactgcaacctccgcctcctgggttcaagcgattctcctgccccagcctcctgagtagctgggattacaggtgcctgtcaccacgcccagctaacttctgtatatttagtagagacacggttttaccatgttaggttggtcttgaactccttgacctcaggtgatccatccacctcggcctcccaaagtgctgggattacaggcrtgaaccaccgtgcccggcctgagacttctgttggtcatgcagatccccaacacacgagggtgggcttggcttgccggagggcatcgatcagcactggctgcattaacgtgttgatttctgtgtttccccaggttgtggggatgttccatccctccgttcagttgtgaagacctctgctctgccctcagctgcaaccagagcctcgtcactctggacctgggtcagaatcccttggggtctagtggagtgaagatgctgtttgaaaccttgacatgttccagtggcaccctccggacactcaggtatgatccatttacttccccatcaggctttctccagagtggtaggtttaggggaagcataatgacatggacctgctgtaggagactgatctggtagctggattacaggttcccgccatcacacccagccaatttctgtatttcacttggagaaacggggtttcaccatgttggtcaggctggtctcaaactcctgacctcaggtgatccgcccgcctcggcctcccaaagtgctgggattacaggcgtgagcaaccgcacccggccaccttttttttttttttcctttgaggcaagaactcactatgttccccaggctggagtccagcagcacaatgatggctcgctgcaggctcgctccagctcctgggctcaagcaatcctgcctcagttcctgagtaggtaggtttataagcatgaaccattgcacccagccacggctgccgtctacctgctcatgatagccatttgtcactgggctgtgttttgtttgttgcattttgtcagggttttggggttttgttttgttttttctttctttttttttttttttttctgagatggagtctcactctgttgcccaggctggggtgcagtggttgctaactgcaacctccacctcccaggttccagctattctcatgcttcagcctcccaagtagctgggattacaggcatgcaccaccacacctaggtaatttttgtatttttagtagagacagggttttgccatgttggccagggtggtctcaaactcctgacctccgtgatttgcccacctcagcatcccaaagtgctgggattacaggcatgagccaccgcacccggcctgagttgtattttgataccatggcatcaaagaaccaagaagccccttcctaggaatgtgggaacttcagaaattctcacaagcaatatactctactgctggcttaaaataatctttatgtagaagaaacatagattacttgtttatttaacatgaaactcagcctaagatactttgtaagtcaaaagacatatggacactaagggtttttttaagctttaagtttgtttgtttgtttatttattatttattttggagacagttttactcttttttttggggtgcatcttttttcttttttttttttttttttcctttttttttttttttttttttattgatcattcttgggtgtttctcacagagggggatttggcagggtcataggacaatagtggagggaaggtcagcagataaacaagtgaacaaaggtctctggttttcctaggcagaggaccctgcggccttccgcagcgtttgtgtccctgggtacttgagattagggagtggtgatgactcttaacgagcgtgctgccttcaggatctgtttaacaaagcatatcttgcaccgcccttaatccgtttaactctgagtggacacagcacatgtttcagagagcacggggttgggggtaaggtcacagatcaacaggatcccaaggcagaagaatttttcttagtacagaacaaaatggggggctgacccccccacctccctcccggacagggcggctggccggttagaggggctcctcacttcccattaggggcggccgggcagaggcgcccctcacctcccggacagggcggctggctgggcggggggctgacccccccacctccccgcccggccagagttttactcttgttgtccagcctggagcgcaatggcgctatctcggcttactgcaacctccgcctcccgggttcaagaggttctcctccctcagcctcccaagtagctgggactacaggcatgtgccaccacacctggctaatcttgtatttttaatagagacagggtttctccatattggtcaggctggtctcgaactcctgacttcaggtgacccgcctgcctcagcctcccaaagtgctaagattacaggcgtgagccaccatgcctggcctgcatctcctctgtttaactggtactccggggtccactgagtagaagttgccaaagtgggtgatagagcgggtaagcaggtattagagctatagcccagctgtactcagcaattccattttctgtgtatgataatcaacaagcatctcaaactgcacaatggctatataccattacaaggttaacctgatgttatgtttttctctatcagatcaacatggttgagaataagaggaatgaaaaaaaggattaaaaagagaaatgaaagtctttaatattacattttattatttacttcatttattttttagacaaaaatctcactctattgctcaggctggagtgcaggggcccgatctcagctcactgtaacctccgcctcccaggttcaagtgattctcctgtgtcagcttcctgagtagctgggattatagggatgcaccatcacacccaactaacttttatatttttagtagagatggactttcaccatcttgcctaggctggtctcaaactcctgacctcaagtgatctgcccacctcactctcccaaagtgctggcattacaggcatgacccaccacatctggcctcattttatatttaaaaataaaaaataagcaaatcaagccaggtacagtttaggcaacatggtaaaaccccaactctactaaaaatacaaaaattagctgagcatggtggcaggtgcctgtagtcccagctactcgggaggcagaggataggatggcttgaacccaagaggcacaggttgcagtgagctgagatggtaccactgcactccagcttgggcaacagagagactgtctttttttttttttttttttttttttttttttttttttttgagatcgcccaggctggagtacagtggcacgatctcggctcactgcaagctccgcctcccgggttcacaccattctcctgcctcagcctcctgagtagctgggactacaggcgtccgccaccacgcccggctaattttttgtatttttttagtagagacagggtttcaccgtgttagccaggatggtcttgatctgctgacctcgtgatccacccgcctcagcctcctaaagtgctgggaattacaggcrtgagccatcacgccccacctgagactgtcttttaaaaaaaaaaaaaaaaaatcaatgtggaacactcctttgccacctagaataatcaggaaaggtgacccatgccctgtgcctccttaacagactttcaggtacttgggaatttgaaacaaatctccttgatgcacaaagtaaccttttcttcccccattgtaccccaggttgaaaatmgatgactttaatgatgaactcaataagctgctggaagaaatagaagaaaaaaacccacaactgattattgatactgagaaacatcatccctgggmagaaaggccttcttctcatgacttcatgatctgaatccccccgagtcattcattctccatgaagtcatcgattttccaggtgtkggtgaactgcctgtgactcctctcctccccsgcccctacccctcagggataatgagttcattgctgggctagatgttttagccatgattctgcctctgttttatacctgcacacrtccttatctttgttacatatgaaatatctgtatcacgggtatattgagagaaataaaggtgagagcattcacaaatgaagctgttacttaataatgggctttgacaagttagagaaaagatatcttactgggtagaacctggggggtgggggaagtgacagtgtttaattgcattgatttctattgccttgtcaatctttgccttgccttggtatttcctttcttttttcttttctttttttttttttttttttttagactgagtttcactctgttgcccacgctggagtacactggcacgatctcagcttactacaacctggcaggttcaagcgattctcctgtctcagcctcctgagtagctgggattacaagcatcccccaccacacccggctaaatttttttgtatttttaatagagatgaggtttcaccatgttggccagtctggtctcaaactcctgacctcaagtgatccacccacctcagcctcccagagtgctgggattacaggcatgagccactgtacccggcttttttttttttctttttctttttcctcaagcatgagtgttgctctgttgcccaggctggaatacagcagcatgatgatagctcactgcagcctcaagctcccaggttcaagcgatcctccagcctcagcctcctcagtagctgggactacaggtgcacaccaccaaaccaggccaatttttgtgggattttttttgaagacagggtctcactatgttgcccaggctgatctcaaactcccaggcgcaagtaatattcctgcctcagcctcccaaagtgctaggattacaggtgtgaaccactgtgcctagcctgtcttgttacttgttgacctgcgtggatcactgcctgctgagtattacttgccagaggatttctcctaccaatctacaatattttaggtgcttcggtgtagctcatatatgaccatgtcattgctctgattttgctttttaaaaattctaacttaaaatagaatctcggccaggcacggtggctcacacctgtaatcccagcacttcgggaggctgaggtgggtggatcacgaagtcaggagttggagaccaacctggccaacgtggtgaaaccccgtctctactaaaaatataaaaaattagccaggcatggtggcacatgcctgtaatcccagctacttgggaggctgaggcaggagaattgcttaaacccaggaggtggatgttgcactgtgctgaagactgcactactgcattccagcttgggcaacagagtgactccttctccaaaaaaaaacaaaatctcatggtatgcatagtttttcactatagagtctccattatttccttgtgatacagaattccaaattcaacaaagcagcagtgcaagctctacgctgtaaaaccacaaacaaaacgaactgtactataaagacaacactagttggcaaagttgcttctcatggggagactttgttgctgtctgtgtttactggatgagcaaacaaatggacggtaagggggaaaaagaacagtacaaatttttattaaacactaatcatgtttttttttgtttgttttgagacagtttcttcttgttgcccaggctggagtgcaatggcacgattttggctcactgcaacctccgcctccccgggttcaagcgattctcttgcctcgacctactgagtagctgggattataggcatgtgccaccaagcctggctaattttgaatttttagcagagacggggtttttccatgttggtcaggctggtctcgaactcccgacctcaggtgatccaccagccttggtctcccaaagtgctgggattacaggtataagtcaccgcacctggcaacatttttttcttttttttttttttttttttttttttttttggtggcagaatcttgctctttcacccaggctggaatgcaatggcacgatctcgggtcactgcagcctccacctccccagtttaagcagttctcccatctcagcctcccatgtagctgggaccacaggtgtgcaccactgcacccaggtaatttttgcatttttggtagagatagggttttgccacgttgtccagactggtcttgaactcctgagctcaggtgatctgcccaccttggcctccccaaatgctgggattataggcatgagccaccacacctggtcaaaagtagttttaatatttaaatttaaaactaaaaaagttaatctctcttcctactttcatttcttcatcaggggctattggtttattcccaccgactagatccaagttctctgatactacctttaaaccactccatcactttccagttccactgcatacagtgtgggcttctgaggtttcctggttcaaggtgtccttgttcaatgcggcatgggtcattccctgagcatttttttttttttttgacagtctcgctccattgcccggtttggagtgcagtggtgtgacctcggcttactgcagcctctgcctcccaagttcaagcaattctgcctcaggctcccggataatttttgcatttttagtagagacagggtttcaccgcgctggccaggctggtctcgaacccctaacctcaagcgatctgcctgcctcggtctcccaaagtgctgggattacagacataagctaccgtgcccggcctccagagcatctttattctcagtttcagcgggaagaagggggaaggttggtaaaaagagaggcacaaagtttaaaaaggacattgcgtgaagaaactaaaggtttctccttctccacactattgacatttgggatcggatcactactcgttgggaaacgtcctgtacatttccagggtgttcggcaccatccctagcctctaccccctagataccagctcacatcctcacagttaacagtgatcaaaaatgtctctgggcagtagaaaatatttcctgaaatgcaaagttttcttaggttgagaaccattgtaatctagccccatctttagagaagaaattgagtaacggatctacatccattgaggaactatcgacaccccaggggcccatgaaatgtaaactcgcactcacaattaaccatctttctccaacgtgtgtatttcatgtagccacactctcagatgcccacccccatgacctacaagtcctaaacagggaaacctgtggcacatgggttcatgtgtgtctgaatctatacgttcagagatgaacaagtactgctctccctatacctgtgaccactcgcctccgcccatcactgaattctgaaaatgtggcctcaggctcacagcagcattagcacttgcttgctctggatctcatcacattgatgatcaagaacaaagtattcactgggttctctgctaaggatacaaaaaaaaccattccacaattccacggccatgtttgcacccaggaaccacgagggctgggttagcccagatggtgggcttgggaaatgttcctggagcaaaaaaaagagccagaagtcatgagagcctgaccccctcccccaacgcgcacacacacacaccactctctacctccaagcctcattttcaggcttctcaaagctaaggtcactcccatgagctaagccgcgcttttctcaatcctcagctcttccacaagaataggaagaactctctcctgttcaagatcctgtggctcagctgcagctctggaagaaagaccccggtgagggtcttgcttttcacaatccccaatcccagaccacatcctgtgccccaaaacaacttccatggtaaccacatccttcaggaagtgaagtcaggcaggaagtcaagtcagaagacggaatgggctgggcatggtggatcgcacctgtaatcccagcactttgggaggcagaggcaggtggatcacatgaggtcaggagtttgagaccagcctggccaacatggtgaaaccctgtctctactaaaaataccaaaagtagccaggcttggtggtgcatgcctgtaatcccagctactctggaggctgaggcaggagaatcgcttaaacccggaaggcggaggttgcaatgagccgagatcgcaccattgcactccagcccgggggacagaaaaaaaaatgtagctgagcatggtagtgcacgtctgtgatctcagctacttgggagtctgaggcaggagaatcacttgaacccaggcggtggaggttgcagtgagccaagattgtaatagtccaatgtgttcaccttgcccactgcctagacagagctgattcgtcaagacagggaatcgcaatagagaataattcatgcagagctggctctacgagagaccagagttttattattattcaaatcagtgtctcccagcattcaggaagcgtttttaaggataacttggtgggtgggtgggaagccagtgagccaggagtgctgtttggtcagggatgaaatcgtgggagccaaagctatcttcttgcactcagttcctgagtggaggccaaaagataagatgggccagtttattgatatgggtggtgccagctgatccatcaagtacagggtctgcaagttaaacgctgatcttagaagcagtttagggagggtcacaatcttgtagcctccagctgcatgactcctaagtcataatttctaatctcgtggctaatgttcgtcctacagggccaatctagtccccaggcaacaaagaggtgtgctttggaaaagggctatcatctttgtttaaactataagtttctcccaaagttcagcctatgcccaggaatgaaaaaggacagcttggaggttagaagcaaaatggagtcagttaaatctctttcactgtctcagtcataattttggaaaggtggtttcaagctggcacaactgcactccaccctaggagacagagcgagaccctgtcaaaaaaaaaaaaaaaaaacaagaagtgaagtcaagataggaggtaaattcggaagacaggaagtggtggtagaagacaagaagtgaagtcatacaggaagtaaagtcagaagacaggaagtgaagtaagaagacaggaagtggttgtagaagacaggaagtgaggtcatacaggaagtaaaatcagaagacaggaagtgacgtcaaaccaggatttgcagtcggaggcaggcaagaagtgaaatcagaagacgggaagtggctgaggggaacgtcttttctctctcctgctcagcccgaagtgaacaggtagcatcaggtgtgccatttcagtgactgggcacagcccaggcacccacatctctctgcagcgcctattcttggaacaccagagacctctacactattttctgttgcttttttccttcattttcagagatgagatcctggattgaatgactactatggaaagtgattgaccaaggtaagtcacaactatcttgttctttaattttggtgttgtttgttatgacttgttagccgtctagcactcatagctttgcatttccactctgcattacttgtatttttattattttgtgatattcgtaataatttattataaaactgtgttatttttggatatttttaagttaaaatgcgattttttaactaagtggcagtatgcaaagcaagtggttcagaactctcccccattaataagtcttctctcctgaaagaaacaattttgagacttcctgttcttaattctgtttaacagcatacttctaaaagaaaaagtgtatactgttattatttattgtgttacaaaaatatacacgcacctttcatgcacgtccgtgtgaagagaccaccaaacaggctttgtgtgagcaataaagcttttaatcacctgggtgcaggtgggctgagtctgacaagagagtcagcgaagggggataggggtggggccrttttataggatgtgggtaggtaaaggaaaattacagtcaaaggggggttgttctctggcgggcagagtcggggtcataaggtgctcagtaggggagcttttgagccaggatgagccaggagaaggaatttcacaagacaatgtcatcagttaaggcaggaacaggccattttcgcttcttttgtggtggaatgtcatcagttaaggcacgaaccggccatctggatgtgtacgtgcaggtcacaggggatatgatggcttagcttgggctcagaggcctgacattcctgtcttcttatattaataagaaaaataaaatgaaataggggtaaagtgttgggacagcaaaaatttttgggggtggtatggagagataatgggtgatgtttctcaaggctgctttgagcaggattaggggcggcgtgggaacctaaagtgggagcgattaagctgaaggaagattttgtggtaaggggtgacattgtgggattgttaaaagaaacatttgtcatttagaattattggtgatggcctggatacagttttgtatgaattgaaaaactaaagggaataaggaaaggagaaaaacaggtattaaaggtctaagaattgggacgactcaggacatctaattagaaagtgcctaaggaggttcagcatagccttgccagcaaagattatttatttattttaagagttaacagtggcggtatggggatagtaccaggagataccagctgtgctggcttggagaaacagtgtaaactggcagtgtaaacaagagcagggcatgtgtgagtagttgagaacggtgaataggagtatgactagacagaagatagtagggatgacaagttttttggggcacaatctaagttggtctggtgtctggaatgagactggggcctaataaaaaggagtgtctacacaggagcttaaatgggctgtatcttgtagcattccaaggacaggcctgaattctggaagcgaaaatggtaaaagtattgtccagtcctttttaagttggtggctgagcttggtgaggtgtgtttttaatagaccattagtctgtcactgaatactaagagcctgaaaaaatgcttggctgatttgactaataaaggctggtctgttagcagactgtatagaggtgggaaggctgaactgaggaattttgtctgacagaagggaatgacaaggctaaactgaagaattatgtctgacagaagggaagaaatgactgcggtggccttctcagaccctgtaggaaaggactgtacttacccagtgaaagtgtctacctagactaagaggtattttagttatcttactcggggcatgttgagtaaagctaatttgccagtcctgggcgggggcaaatccttgagcttgatgtgtagggaagggagggggcctgaataatccatgaggagtagtagaatagctgatgcaacactgagaagtgatttctttgaggatagatttccacaatggaaaggaaatgagaggttctaagaggctggctagtggcttgtaccatagcatagcctgcctttgctggtgtgtggcgattaggcctggtggaaccgccatcaataaactaagtgtgatcagggtgagaaacagggaagaaggaaatgtggggaaatggggtgaacgtcaggtggatcagagagatgcagtcatgggggtcaggtgtggtatctggaataatgtgggaggccagattgaagtccgggccaggaacaatggtaattgtgggacttaacaaagagtgagtacagctgaaggagccagggagcagaaagtatatgcatcaggtgtgagtaagaaaatagattttggaaattatgagagctgtagagagtgagttgagcatagtttgtgattttgagggcctctaaaagtattaaagcagcggcagccacagcacgcagatatgagggctaggctaaaacagtaaggtcaagttgtttggacagaaaggctacagggtgtggtcctggctcttgtgtaagagttctgaccgcgctaaccatgcctaggaaggaaaggagttgttgttttgtagaaggtgctggggcttgagagatcagtcagacacgatcagcagggagagcacgtgtgtttttatgagaattatgccgagataggtaacagatgaggatgaactttgggcttgactgaagtaatgggggctgtctgtgaaaccttgcagcagtacagcccaggtaatttgctgagcctaatgggtgtcagggtcagtccaagtgaaagcgaagagaggctgggacgaggggtgcaggggaatagtgaaaaaagcatctttaagatcaagcatggaatagtgagttgtggaggaaggtattgaggacaaaagagtgtaggggttgggcaccacagggtgcataggcaaaacaatttgataaggcgcagatcctgaactaatctgtaagacttttccggtttttggacaggtaaaatgggggaattgtaaggagagtttataggttttagaagcccatgctatagcaggcgagtgataacaggctttaatccttttaaagtgtgctgtgggatgggatattggcattgagcagggtaagggtgattaggttttaatgggatggtaacgggtatgtgatcagttgccagggaaggagtagagatgtcccatacttgtgggttaaggtgggggaataggagaggaagacgcgaaggaggctttgggttgaggagaagggtggcaatgagatgcggctgtagtccaggaatagtcagggaagcagataatttggttaaaatatctcggcctaataagggaactgggcaggtggggataactaaaaaagagtgcataaaagagtgttgtccaagttggcaccagagtgggggagttttcaggggtttagaagcctggccgtcaatacccacaacagttatggaggcaagagaaacaggcccttgaaaagaaggtaatgtggagtgggtagcctccgtattgactaaggcgacggacttaccttccaccgtgagtgttacccgaagctcggcatccgtgatggtctacagagcttccgaggcgattgggcagcatcagtcttcagccgctaagccgagaaggagtcagagagccttgggccagagttccaggggctctgggagtggctgccaggtgagttgaacagtccgatttccagtggggtcccgcacagatgggacacggcttaggaggaatcctgggctgcaggcattccttggcctggtggtcagatttctggcacttgtagcaagctcctgggggaggaggttctggaggaacgcctggccgctgcggttcagttcccttcttgtgtgctggagatgtggctggggtttgtctcacagtggaggcaaggaattgcaacttttttctattattgtacaccttgaaggcgaggttaattaaatcctgttgtggggtttgagggccggaatttaatttttggagttttatttaatgtcgggagcagattgggtaataaaatgtgtattaagaataagacggccttttgacttttaagggtctagggctgtaaagcttctcagggttgctggcgaacgagccatgaattgggctggatttttatatttgatgaaaaagagcctaaacactatctgatttgggataaagaaaaaggagcattaaccttgactatgcctttagctccagccacctttctaagagtaaattgctgggcaggtggaagagggctagtcactgaacgaaactgtaagctggaccaggtgtggggaggggaggtgataaaaagataatacggtggaggagcggaggctgaggaagaattgggacctagctcagcctggggaggagggagaggtcagacgggtctgtagaaaaggaagattagaaagactcagcgacgcttggggttgagactgaggggacaggcaggagggaaagaaggaagatttgggacgagttgcactgggcacagagactaggaagggactgatgtgtaaaagaatgcctggacgtcaggcacctcagaccgtttgcccattttacgacaagaattatttagatcttgcaggatggaaaaattgaaagtgctgttttctggctatttggaactgctgtccagtttgtattggggtcaagcggcattgcagaagaaaataaggcatttaggttttaggtcaggtgtgagttgaagaggttttaagtttttgagaacacaggccaagggagagaaggaggaggaatggagggtggaaggttgcccatagtgaaggaggcaagcctagagaaaagagagagtagagacacggagggaaggggttcgggagttcttaccttccagaaaagcgggaaaggggttggggcatggatataaggggttggggcacagagataagaggttggggcatggaaataagggatcagggtgcagagatacgaggttggggtacttgcccctctagaaaagcgggacttgccgctaagagtgaaggagaaggggttgggggtttcttgccccccagaaaggtggagaaggggtagagacatggagaggaggggttggggaacttgccccttccccagaaaagtgggacttgccactaagggtgaaggaccaaggcaggcatccctgcgtgatctgacacctctgaagcgtgggtatataatcagagaggcgtccctgcaatgattaaacgccaagggaaggctgccttccctagtccgtgaccggcgccggagttttgggtccacagataaaacgtgtctcctttgtctctaccagaaaatgaaaggaattgaaattaagagaagggagagattgaagagtggaaaggagaaagtggttgagggacagtgagagaggttggagaagagagtaagaagaggtcgcttacccaatttaaacttggtgagatgttccttgggctggtgggtctgaggacctgaggtcgtaggtggatctttttcacagagcaaagagcaagacaggggattgatctcccaagggaggtcccccgatccaagtcacggcaccaaatttcatgtgcgtccatgtgaagagaccaccaaacaggctttgtgtgagcaataaagcttttaatcacctgggtgcaggtgggctgagtccgacaagagagtcagcgaagggggatggggtggggccgttttataggatttgggtaggtaaaggaaaattacagtcaaagcggggttgttctctggcgggcagagtgggggtcacaaggtgctctgtaggggagcttttgagccaggatgagccaggagaaggaatttcacaagacaatgtcatcagttaaggcagtaacaggccattttcacttcttttgtggtggaatgtcatcagttaaggcaggaaccagccatatggatgtgtacgtgcaggtcacaggggatatgatggcttagcttgggctcagaggcctgacagcacctacctaaaaaattccaatagcactaaaagggtgtgtacaaaatgcagtggctgactaaccatctcctccattgctccgcctaagagacacccacttttagctgttttctttaggaacttgttaatattaggtttctaaaaacatgtaaccatgtgaatgagcttagacttactggattcctatcataataggcggggccttagttattctacagcgttgttcttactgttttttctcttccaatgtttatctctatgtctgcatatcaacattcagtatcacattttttttttttgagacagagtctcactctgtcacccaggctggagtgcagtggcgcaatctcagctcactgcagcctcagtctcctgagtagctgggactacaggcgtgtgccaccacgactggctaatttttgtatttttagtagagacagggtttcaccatgttggctgagctggtctcgatctcctgacctcgtgatctgcccacctcagcctcccgaagtgctgggattacaggcatgagccaccacgcccggccagtatcacatgtttatacccacagatattcgcagccgagaattttcgggtaatataacttgcttcttttatttttgttgttgttattgttcccctaaagtttatatttgttttttatttttattttcttttgaggcagggtctcactctgtcacccaggtttgacagcagtggtgcaatcatggctcactgcagcctcaacctccccgggctcaggtgatccccaacctcagcctcctgagtacctgagagtaggcatgtggtaccacacccagctaattktttatattttttgtatatgagacaaggtttcaccatgttgcccaggctggtctcgaactcttaggctcaagcgatcccgcctcagcctcccaaagtgctgggattacaggtgtgagccactgtgcctaggctatactggtctttttaaaatctacttagtttacttgacctctaaaattatttttcctctgtyttctgatagcatctcagtatgattttccactatgttaagacgaggaattgacccattcttacatttggaggcttctctaagcaactttcccattcccccttcacccaagctgtgtgctcactagccctgattcacagccgtcgtcctggaacttcttggtgccatccttctgtcttttcccaagtgactcacctmcctcaacctcccamagtgccgggattacaggcrtgagccactgtggccagccattcttttccttttttaaaacaatttttatcttctttattttaagtagagatggggtctcactatgttgcccaggctggtcttgaactcctgggctcaagcgatcctcctgccttggcctcccacagtgctaggattacagacatgatccactgcacttggcccagtggtacagttttacactcattagatggtcaagaaatgcctaaacgctataataaatatagaactttaccttgagaagacctaacatttccttcagaaagtaaatatgagaggggtggagacggtgcattatcttatttttatgattttaaaaatgtatacagaattgtacatatttatggggtggacagcaatattgcagtacatgtatacaacgtgctatgatcaaatcagggtaattgacatattcatccctgtattttttgagacaargtcaggcttcgtcacccgagctagagtgcagtggtgtgatctcagctcactgcaacctctgcctcccaggctcaagccattctcccacctcagcccccygagttgctgggagtatagggatgcaccaccacacctggctaatttttgtgtttttttgttttgttggtagagatgaggtttcaccatgttgcacaggctgatcttgttttctaatgtgaagggaagcgggcaacgtgctagttttacactaaggaaaatgaatgacatacccaaactgcctgcaagacccgttctgagagacgaaaggagatttgttagaccgcagtgggagatggagtgagggtgagagtttctggggaaaaccagacaagagcacagagggccaaagggaagcacrggaggattttgcacagaggatggaacagagtcaaccctgagagctgggaaccttagagatccgtctggagcccatattagagaggttgaagaaagaggccagtatgtggtccagccagggtaccatgtcatccacagtgtgcagggaggaggatggggtctccacagattccttccatcccaaatggagggtgccctcagacagagaggcagacagacagacagacactggccgaacggctccctgatggaacaccaggaggaggcagcatggcctcgtttccacagctgtagcctctgccctcctgcttccacgctccacacacgccagtctttgagtcgcctcccatgccatgatccctcccttggatacgaccgtgcctggggttcagcggtcatgaacataacccgcggctgtgaacatcctgtcggcctccatcctgacccccgtktgatttccgggtcwgcgggaggggcgggaggggcggaagcggcctctgcacagccctgcccctgtgccgcaggcgcttcctccggctgtgccagtcctctgccagaaaccccgccaggattattaggatcacagccccgaggcatatccggaccaggttgcccttggtgtagtactggcgggcaggacctggaggaatgaggagaggcaggagcaggtgaaagagcccacctccaggaccccctccaagccacatctgggcttctcagagatcctattattctctactagctaggggatgccgctcactttcctggagggtccctcccttcccgagtaggggtcagggccagatgaccccaattctctaagtagcacctctccctcctgtgctctcacagggctctgagacaactcctccccagacacagatgctgcctcgttatctgatgcattgcaaaagagaggacagttataaggggtggggaagagatggaatctctctttctctgaccctttttaaaatctcaaccttcccacctgatcttaatgcccaattctgaaccccatacgctgatattctgcctttactctacacactggaacccaagatctgagagctgcagcccctgcgtagacaaaggagttggctttggtgaagagacgggtgagaaggaagggggtctggagaggatgacttactcaccagctggagagtctgactcctttggactggyggtgatactcctagaagtctctgggaaccaaacaaaggctaagtgtgaaatgaaaccatattcccgccccctgtcactgtgcctactccgaacacacacacacatggkgaggcacaattccacagcatttaagaaaagcatgggccgggcayggtgcctcatgcctataatcccagcactttgggaggctgaggtaggaggctggcttgagtccaggagttcaagaccaacctgagcaacatagaaaaaccctatctctacaaaaaaatacaaaaattagccaggcgtggtggcacgtgccagtaatcccagctactcagtggaggctgaggcaggaagatcacctgagccctgggaggttgaggctgcagtgagccaggattgtaccactgcactctagcctgggaaacagagcgagacmctgtccaaaaaaaaaaaagcaagaactgtagagtcaggctgtcctccagatttgaaccccaactctatcacctattagatgtcagttatctggcaagtgactcagcatctgtgagccagttccccatgtgtccaataaaattaacaagatcccttataggttgatgtgaaagtcaagataataataatggtagaaatataaagcaccgtgcttgacatatgagcacctcatacgtgccagcttttttttttttttttttgagacagagtctggctctgtctcccaggctggagtgcagtggcccgatgtcggctcacttcaacctccgcctcctgggctcaagcgattctcctgcctcagcctcccgagtagctgggactacaggcgtccgccaccacgcccagctaagttttgtatttttagtagagatgggatttcaccatattggccaggttggttttgaactcctgaccttgtgatccgcccgcctaggcctcccaaagtgctgggattacaggcgtgagccactgcacccggcctccagctctcttattcctcaagtatctcctgagactcgccaggtactcagccatgtgctgggccatgggaacccaaatattaataagacattgtcaggccaggcatgacactggctgaatgcctgtaatcccagcactttgggaggccaaggtgggcggatcacctgaggtcaagagatcgagaccatcctggccaacatggtgaaaccccgtctttactaaaaatacaaaaaatagctgggcatggtggcacacacctgtagtcccagctactcaggagccggagattgcagtgagctgagatcgcagagtgagccgaaatcacagatcacagagtgagcagagtgagackccgtctcaaaaacaacaacaaaaaacaaaaaaaccataagacattgtccatctgcggttcccagactattgcaggagaccaaaaagtaaagcgatttttttttttttttaatacggagtctcactctgttgcccaggctggagtgctgtggtgtgatctcaggtcactgcaacctccaactcgtgagttcaagcgattctcctgcctcagcctcccaagtagctggaattacaggtgcccaccaccacgcccggctaatttttgtattttcagtagagacggggtttcagcatgttggccaggctggtctcctgacctcaggtgatccactcaccttggcctcccaaagtgctgggattacagacaaagcgataattttaatatactgtaaaaattgctgtaataggcagcccacaagacactgagcgagagcagaggaaaccatcgatccagcctggacggtcaaggctttcttgaggaattgatgccatggggaaatggaagaaaaggcagagtgagtgggttgggtgcagagtcaggagaggttaggaagcctccaggagagcttcaagtgactgtgtgtggctgagaacagcatgggaatgcgtggaaggtatgcagacaaaattggagggatcaacaggggctggatatctaagctcacagaatagcaagctgaggaattggaactgcatcctgagggtgattgggaggttccgaactgaagatagggaaggcttccatcacagaactccctgggatatgccgggcgcggtggctcatgcctccaatcccagcactttgggaggccgagacaggtggatcatgaggtcaggagttcaagaccagccttcccaagatgctgaaaccccgtctctactaaaatacaaaaattagccaggtgtggtggcatgcacctataatcccagctactcgggaggctgaggcaggagaatcgcttgaacccgggcagcagaggttacagtgagccgagatcgcaccactgcactccagcctgggcgacagagcaagactccacctcaaaaaaataaaaaatagaactacgtgggatcaggtgcctcatgaaagccagagtcatgtgggcccagtggaagtatctaacctattatcagggaatctgtgaaggtgtttagtctggaaggaaatggagattttccaggacaggcaaggggaaagagactgaggaaagcgtatctgcagaggcctggagcggttagaagatgtgctrtgtccaggtgcctacagtctgtgtgcgtccgagcatgggctctacctggacacagtgaggagcgagattaaatacctggatcacagccgagtccaaagcctaggacttcatcctgggagcagtgcgtagggatggcggtcgtcccgccacagccttggctccgccatctttgaaatggccccatcacccaaaaygctcctccttctgaaccccagagctccactctgcacccatgctctagcctcacaccaaggactttcttggtaagagacggacagttcggtgaagtgrttraaagcctacaggcttagataatggaagagagagctccgtcctcacactcctttctgctgagcatgaaatgcctggttactcaccagttgtgaagacttygtttgtgaatgagacggtcagttcagcggtggcttctgagaattctaagaaagcaaaacaatgttaggtcttccccgtggttccctatatcctctagatatctccattccccttttgagatatctaggctccctgaaacccctttctctgacacactgcacagacactgaagacagacaaattcgaaaggtgtaagacttatcttccatgaccggcttagtaagaagcagatccgttcagcaattgatagacacttggttttttttccacgttttgctgttatgaatattgctgctgtgaacattgacgtacaggtttttgtgtgaacataagttttctgttctcttgggtacacacccaggggtggtggaatcactgggtcatacagtaactctgtgttttactttttgaagaactaccagacttctttcttttttttcttttttttttttttttgagacagagtctcattctgttgcccaggctggagtgcagtggcgcgatctcagctcactgcaacctccacctcctgggttcaagcgattctcctccctcagcctcccgagtagctgggattacaggcacctgccatcacgcctggccaacttttttttttgtactttagtagaggcggggtttcaccatgttggccaggatggtctcgatctcctgacctcgtgatccaccctccttggcctctcaaagtgctgggattacaggctgcgcctggccacagactgtttttcaaagcagctgcaccattttatattcccaccagcaatataagaaggttcttccaaatcctcaccaatacttcttgtccgtttgttttgttttaaaaatcatagtcatcctagttggcatggtgaattttatggtatgtgaattatatctcagtttgaataataagatgtggatccatgtcttcgtgagcctagaggaagaatgagctcgtgttagcctcagaacacgggatctccaccttccaacttaggccattttctttttttctttttttttttttttttgagacagagtcttactctgtcgtccaggctggagtgcagtggtgcaatctcggctcactgcaagctctgcctcccgggttcacaccattatcctgcctcagcctcccgagtagctgggactacaggcacccgccaccacgcctggctaatttttttgtattttcagtagagatggggtttcaccgtgttagccaggatggtctcgatctcctgaccttgtgatccacccgcctcagcctcccaaagtgctgggaatacaggcgtgagccaccgcgcccggccaggccattttcttaaccaggggcctcctgaggccaccaaaatattcctgaactgcctcagctgataaatacgaagctcttgttgcagtgggtactatcctgggagtctttttatggtggaaccagcttggaaaaaactagtttatgctcagctctcggtggcataatgagagtgtgggtattatttggtctttgttatttctcttcgtgtgagatgcattaataaaccttttttttttttttcaattaaaatttcagttccagaatccatgtgcaggacgtgcaggtttgttacataggtaaacgtgtgccatggtggtttgctgcacccatcaacccatcacctaggtattaagccccacacgcatcagctatttatcctgatcctctccctcccccaattccccctacaggccccagtgtgtggtgttcccctccctgtgtccatgtgatctcattgttcagctgccacttacaagtgagaacatgcagtgtttggttttcagttcctgtgttagtttgctgaggataatgttttccagctccatccatgtccctgcaaaggacatgatctcattcctttttatggctgcatagtattccatggtgtatatgtactgtatttgctttatcctttctatcattgatgggcatttgggttgattccttgtctttgctattgtgaatagtgctgcaatgaacatatgtgtgcatgtatctttataatacaatgatttatattcctttgggtatataaccagtaatgggattgctgggtcaaatggtatttctggccaggcgcagtggctcacacatgtaatcccagcactttgggaggccgaggtgggcagatcacctgaggtcaggagctcaagaccaccctggccaacatggtgaaactcccgtctctagcaaaaatccaaaaattagccaggcgttgtggcatgcacctgcagtcccagctactcgggaggctgaggcaggagaatcacttgaaccctggaggcagaggctgcagtgagccgagatcatgcccctgcaatccagcctgggtgacagagtgagactctgtttaaaaaaaaaaaaaaaaaaaaaaggtggccctggtgcggtggctcacgcctgtaatcccagcactttgggaggccgaggcaggtggatcacctgaggtcagaagtttgagaccagcatgaccaacaaggtaaaaccccatctctactaaaagaaaaaaaaaaaaaaaagccaggcatggtggcaggcgcctgtagtcccagttacttaggaggctgagacaggataattgcttgaacctgggaggtggaggttgcagtgagccgagatcgcaccactgcactccagcatgggctattgagcaatactacatctcaaaaaaaaaaaaaaggaaaaaggatttctggttctgggtctttgaggaatcaccacactgtcttccacaatgaactaatttacattcccaacagtgtaaaagcattcctatttctccacagcctcgccagcacctgttgtttcttgacttttgttggttttttttttttttttttgagatggagtcttgctctgtcgcccaggctggagtgcagtggcacaatcttggctcactgcaacctccgcctcccgggttcacgccattctcctgcctcagcctcccgaatagctgggactacaggcgcccgccaccacgcccggctaattttttgtatttttaatagagacggggtttcaccgtgttagccaggatggtctcgatctcctgaccttgtgatctgcctgcctcggcctcccaaagtgctgggattaccggcgtgagccaccgtgcccggcgtttcttgactttttaataatcgccattttgactggtgtgagatggtgtctaaatgtggttttgatttgcatttctctaatgattggtgatgttgagcttttttttgtatgtttactggctgcataaacgtcttcttttgagaagtgactgttcatgtcctttacccactttttaatggttttttttttcttgtaaatttgtttaacttccttgtagattctggatattagacttttgtgaattgatagattgcaaacattttctcccattctgtaggttgtctgttcactctgatgatactttcttttgctgagcagaagctctttagtttagttagatcccatttgtcagtttttgcttttgttacaattgcttttgacgtttttgtcatgaaatctttgcccatgcctgtgtcctgaatggtattacctagattttcttctagggtttttatagttttcgggttttgcatccaagtctttcatccatcttgagttaatttttgtacaaggtgtaaggaacgggtccagtttctattttctgcatatggctagccaattctcccagcaccatttattaacccacagccaatttcatactaaatgggcatttcccttgaaaaccagcacaagacaaggatgccctctttcaccactcctattcaacatagtattggaagttctggccaggataatcaggcaagagaaagaaataaaggatactcaaataggaagagaggaaatcaaactatctctgtttgcagatgacatgatcctatatctagaaaaccccatcatctcagcccaaaagtttcttaagctgataagcaacttcagcaaagtctcaggatacaaaatcaatgtgcaaaaatcacaagcattcctatacaccaacaatagacaggcagagagccaaatcatgaaggaactcccattcacaattgctacaaagagaataaaatacctaggaatacagctaacaaggaaagtgaaggacatcttcaaggagaactacaattcactgctcaagaaaatcagagcggacacaaacaaatggaaaaacattccatgctcatggataggatgaatcaatatcgtgaaaatggccatactgcccaaagtaatttatagattcattgctattcccattgaactatcattgacattcctcacacaattagaaaaaactataaaattcatatggaaccaaaaaagggcccatatagccaagacaatactaagcaaaaagaacaaagctggaggcctcaggctcagacttcagactatattacaaggtgatagtaaccaaaacagcatggtactggtacaaaaacagacacatagaccaatggaacagaatagagatctcagaaataagaccacacatctacaaccatctgatcttcaacaaacctgacaaaaacaagcaatggggaaaggattccctatttaatacaccttgttttgattttgatttcaacacagcgtgtggtatttgcatgccatgtgatacagtttgaatatgtgttcccaccaaatctcatactggattatgatccccaatgttggaggtgggggcctggtgggaggtgtttggatcataggggtggatccctcattgcttggtgctttccttgcaatagtaagtgaattctcacaagatctggctattgcaaagtgtggcatgtcccccagtcccaactctctctctctcttgctcctgctcccaccacatgagacagctaccccctctttgccttctgccatgactgtaagcttcctgaggcctccccaaaagcagaagccagccttctgcttcctatacggccttcagaaccatgaaccaattaaacctcttttcttatcaatgatccagtctcagatatttatagcagcacaaaatcggcctaatatagcatgaaatattgctcagcaatcaaaaggaacacatcattgatacatacagcagcttggatgggcctcaggggcattgcactgagtgacaaaaggatatctcaaacggttgcatactggatgatcccatttacatcagattctagaaatggaagattatagagatggagaacaaattaatggataccaggagttagggatggcaagggaaggagaagggtgtaggtgtgaatataaaagggtagcccaagggaggcccttgtgagacggaagagttctgtacagtgactgcggtgatggtgacgcgaatctacaactgtgacaaattggcatagaactagacacctactttatgccaatgtcaaattcctggtttttatgttgtactctaattacgtaagatgtaaccattagaggaaactggaaaaagagcacatgggattcttctgttctatcattgtagacttcctgtgactctagaaccatttcaaaagagaaagttcaaaaattcagtcagaagcacacgcacacatatgcacgcatgcacacacacacatatgcacgcatgcacacacatatgcacgcacacacacatatgcacgcacacacgcacatgcacgcacacacacatatgcacgcacacagtatgtgaccatcttccatgtccctgcccactaggcataatagccctcactctgccctcaaccccgcaaatctcatccttatcaacctcggctctttccagcatgtttctcctgccttggtgcttcactctgagacrcagggaatgttagacacgcccagcctccagcctagcgtatgatattcttaaagtgcaggccgtagtctggtacaccgtattcagctgagatgtttgtgaaagtggaggggataacacgcctcacacaaaacttaccgcagtggttctcaaagcagcattctggagccatagcatcagcatcacctgggaacttactaggaatgaaaatgactggattcaccccagacctactgaagcagaagccctgggggctcagaaatctattctttaagcctccaggtgattcttatgctcatggaagtttgagaaccgctgatcaatgcawtcagtgactcagaaacagagtcccggactctacaggtttgttggttggttggttggttggttggttggttagtttgtttgtttttgtcacccatattcaaccagctggactccacagtatagcaagccactccgattattcttctgcatgttatatgtgataaaccatccacctagagtaggattgggggcagcatcttaacatctaactacttaggacacccaccctgtttacaggcagaaataaaggatttttaaaacaaagcaaatctgtgaaagaaccaactgaattaaatcgagaagtctaggcagagaggagagagagaaggggtccgtgtacctcatacgctgtgcaccagaatggaccctgcagaacctacctgctaccgrggaaggtggttctgttggtaaccggctgggggtcacagaggttcctgggaaatcagaaaatgagataaatctgtgctctgtcgctgtgggtcctgaacaaataacgaaacatctccgtgactgagtttcctcaccggaaaaatgagcctaaagtagcttacatcactggactgttgtggatgttaataagcatttgagctgggtgcagtgcctcatgcctgtaatcccagcactttgggaggctgaggagggcagatcacttgaggtcaggagttcaagcccagcctggccagtatggtgaaaccccgtctccactaaaaatacaaaaattagccaggcgtggtggtgtgcacctgtaatcccagctgctcgggaggctgaggcaggagaatcacttgaacctaggaggcagaggttgcagtgatctgagatcgcaccactgcactccagcctgggtgacgcagtaagactccatctgaaaaaaamaggcttagccrggcgtggtggctcacacctgtaatcccagcactttgagaggccgaggcaggcagatcacctgaggtcaagagttcaagaccagcctggccaacatggtgaaaccctgtctctacgaaaaatacaaaaattagctgggcatgatggcaggtgcctgtaatcccatctactcaggaggctgaggcaggagaatcgcttaaacccaggaggtggaggttgcagtgaactgagatcactccactgcactccagcctgggtgacaaagtgagactcyccccaaaaaaaaaaaaaaaaaaaaaagcagcagcatttgtaaagcacacctggcacattctgggctattaacaaggaaatgcatgcagctcccgtccrcctttttcaacctcagttctatttcttctggattcctgtgtcctacccctcactgtgaccctgggggcaaaacagatttttctaccaaaaactaaatgatgtattttgtttgatttaatatgacattgttaaatgtactgatcagtggcgttgggtatgttcacattgtggtacaatatgttgacctctagaacttatttttcttgcaaaactgaaattctgtgcccattaaacactaattccttctctctcctctttctggcccttaacaaccaccattgtactttgtgtttctacagtgttgacattagatacctcctttgactagaatcatacagtagttgtccttttgtgactgacttagcataatgtcctcaaggtatatccatgttgtagtatgtgtcagaatttccttcttttttaaggctgcataatattccattgcatgtatataaccacattatgaggtatgctgctcttttttgaaagaaaccccctttaagaatggtagtcaagtccgacgcggtggctcacgcctgtaatcccagcactttgggaggccgaggcgggcagatcatgaggtcagttcaagaccagcctgaccaacatagtgaaaccccgtctctactaaaaatacaaaaattggccgggcatggtggcaggcacctgtaattccagctactcgagaggctgaggcagcagaatcgcttgaacccggaaggcggaggttgcagtgagctgagatcgcgccactgcactccagcctgggtgacagagtgagacttcgtcaaaaaaaaaaaaaagaaacctccattctcccagctgcctgtagcccagggcttcctgccctcccacttccttcccacctctggccccgcccctgcagcccagggcttcctgccctcccacttccttcccacctacggccccgcccctgcagcccagggcttcctgccctcccacttccttcccacctacggccccgcccctgcagcccagggcttcctgccctcccacttccttcccacctacggccccgcccctgcagcccagggcttcctgccctcccacttccttcccacctacggccccgcccctgcagcccagggcttcctgccctcccacttccttcccacctacggccccgcccctgcagcccagggcttcctgccctcccacttccttcccacctctggcgccgcccctgcagcccagggcttcctgccctcccacttctttcccacctatggccgcgcccctrcagcccagggcttcctgccctcccacttccttcccacctacggccccgcccctgcagcccagggcttcctgccctcccacttccttcccacctacggccccgcccctgcagcccagggcttcctgccctcccacttccttcccacttatggcccctcccttggaatggccatcaggacctataaaggctgaggaagaaaggtttggtctgcactacccctacctgtgaccacaagctccagggggtcgctgggggcygaccacaggtatgggtccctgctggagaagctgtagcatcggtaggttccgctgtgggcggcggtcaccgtgatgatgggraaactagccckgtaccatctctcgggattcttgtagggcgcagggtccccttccttgtacagagcaaattggtcaaagccataccgagtctgacactgtagggttacgtcccctcctgacgacaccgccgggccgggctgggctgagagcgagggtttggcaaaaactcctgggagaaaaagaaagtctgatgttgaaggcaggagccagcatctcagctgagactggggaggtccccacacctgcctaagagctggggagctttttggctgtatccctcccagagagcgcactcccccacccaagctcacagagaggtcgagtcacccagtggttgaggaaggaggctgtgctcacgtcctagtgcttgggtgcaaatcctagttctgccttcaggggcctggtggccctggagacaaatctccctctgtatctgagcctcactgccttgttctgttaaaatggggatgactgaatgagacagtayacagtaatttgcagagtgcctgttgcctagcaagcgctggagtaagtaaatagcttaagcttatactgtgctgtaagcttgtattgccacatacaattgttacgttgtaaatgtggctgacagtgctagcttccgggtgccttccaaacttatgatgtatatcagttcagtgaatcctcagagacctatggagtcctcactcttaatgtccctattttataaatgaaactaaggcacatggcattaaataatttgtccaactctaggtaacaatactgcagtgtayagctgaaatttgctaagagggtagattataagtrttctcacacacaaaaaagttaactgtgtcaggtgatgtatgttaattagcttgctagtagtaactgtctcacagtggattcgtatatcaaaacatcaacttgtacaccttggatatattccatttttgtttttcaattatacctcaacaaagctggacatattttaatttaaaaataaataaaaaacttgtccaagatcataagtggcagagttgaaatctgcactcacagagtttgattccagggtctccgctcctaaacacgaacctacactactctgatgtgaggttgttgtcatagaccggtgtggtgatgcatgcctgcacacaggagtcagaaaaacaaaggttgaggctgggtgcggcggctcacaccggtcatcccagcactttgggaggccaaggtgggaggatcgcttgagcccaggaaggcgaggctgcagtgagctatgatcactgtacactagcctgggtgacagagtgagaccttgtctcaaaaaaagacagagagagaaagcaaaagaaaggaagtaaggaagataaaaatataagctgcctaataattatggcattcactcaacaagaagaaaaagaaagaaagaggaaggaagggagggagggaggaaggaaggaaggaaatatataagctgcctgataactgtaacattcactcagcaatattttctcttaattttcacttaagcaactattatgtgtctgtctgtattctttttttgttgtttcatttgttttgttttgttttgttttgttttgagacggagtctcgctctgtcacccaggctggagtgcaatggcatatatatatatatatatatatatatatatatatatatatatatatatatatatatatattttttttttttttttttttttttttttttttgggaaacagaatctcactctgttgcccaggctggagtgcagtggcatgatcccagctcactgcaacctccacctcctgggttcaagcgattctcctgcctcagcctcccgagtagctgggactacaggcatgcaccaccatgcccagttaattttgtatgtttagtagagacagggtttcaccatgttagccaggctgatctcgaactcctgacctcaggtgatccgtccacctcggcctcccaaagtgctggcattacaggcgtgagccaccgtgcccgaccaggaattaaaaatagacaaccaccaccaagataaaaaaaggtatacttcacataccagatagtgaggagggccactttgactagggtggtgggggatatacttagcgagaagagagtatttgagtctgaccctgaaagaagtaatgaggcagccaggctggtccattctagtagcagagaggaggccagtgatgctgtggaggggagtgaggcagggaagaggggagggaggcaggatttataacgcggaatagaccacagtgcagctggccaggaattagggtggcgtgagtgaggcactctcctgggatgtaaaatttaattattcccaaacaattaacatatttgaaaaaattattgaaaatttgaagagtaggtcgttaaaactcacattattctgtttgaatactttattcccctgaaagatttattagaattttacattctaggcttttgtggatgcaagcgcatcagtgctatttccaaaacctacttctagaaaataaccatttaaaagtgcactaactgggtgcacctatagtcccagctactagggaggaccacttgagcccagggatttgaggctaaagtgagctatgatcatgcctgtgaatacagcgagtgtactaaagcctgggcaacatagtaagacctcttctctttttttttttttcccaagacggagtcttgctctgtcgcccaggctggactgcagtggtgcaatctcggctcaccgcctcccaggtttaagcgattctcctgcctcagcctccggagtagctgggattacaggagtgcgccaccgcgcccagctaattattattattttttttagtagagacggggtttcaccatgttggccaggctggtctcaaactcctgaccttaagtgatccacccacctcagcctcccaaagtactgggattacaggcgtgagccgccgcgcccggcccaacctcttctcttaaaaaaaataaataaataagaaaagaaattagaatatttgcaccaatcaagagtctaaggagacataaatactaaatgcactgtggggccctggacggggtctgggaacagaaataggatattagtggaaagactggtgaaattcaaatagcctggagtttacttgatataatatagttgtgtctatggttagttttttgtttgttttttgatacagggtctcactctgtcacccaggctggagtgcagtggcgtgatcacagctccctgcagcctcggcctccctggctcaagcgatcctcctgcctcagcctcctgagtagctgggactataggtgtatgccaccatgccccactaatttttaattttgtttaaagatgaggtctcactatgttgcccaggctggtcttgaactcctgagctcaagcaatcctcccgcctcagcctcccaaagtgctgggattacaggtgtaaaccactgggaccagtgctacgtttattttttggttgtaacaaatgtaagatgttaacatgaggggatcctgggtgaaatatttccattaatattatctttggaacttttctgtcagtctaaaaattactccaaaacaaagttttaaaaagaatcccgagccaagcacggtggcccgtgaccgtagtccctgctactcatgaggctgaggcaggaggattgctcaaggcaaggagctccaggctgcagtgagctatgactgctcctatgaacagccactgcactccggcctgggcagtgtagcaagaccccatcgctaatttttttaagtgcattaaaacacagataaagggttgcctgtttttcgttttggcacagactctggtatgacttgacacaggcactggctgattctgcctttatttgaaattctggtttttttcattgtggatgtttttgcaatttattttgatttttttaaaaattgcatgaaaatgttattcacagccagatgcagtggctcacgcctgaaatcccaacactttgggaagccaaggtggaaggatagcttgagcccacaggagttcgagaccagcctgagcaacatagcgagaccctatctctctctcttttgtattttaatgccttttgtgaaaactgtcaagagaccccatctctataaaaacataaaaaatgagctgggcgtggtggtgcacacctgtaatccyagctacttggagggctgaggcrggagaatcgcttgagccctggaggtggaggctgcagtgagccaagatcgcgccactgctctccaccctgggtgacgcagcaagaccctgtgtccaaaaaacaaaatattattcacattgatccataaatgtcgtggcaccaccacccgctaggccagtgcctcgtttgcctcaccctaatccctgccctcaatgtcccccgtatttgtgtcctgaacggaggaccacgcagtcccaggctccgatcccccttcctttacccgtggcaacgagctccagctggtcgctgggcagggaccagaggcttccgttctggtaggagcagcggtagcgtccagccagacttctcttcatggccgggatgaagaggactgcctgatcctggtacctgctggaactcagcttctccaggcggtacaggtccacgcccggaggtccctggcaccggagggtcactggcttctccaggggcaccagggagctgggcagagcctggagggagggcttggggagcggtcctggaagaggagcagggctgggtcagcctccccgcagaccccgcctggaccccgctgctcccgcgctggcggatcccgcaggagggaaggggtctggggaaggactcaccactctgcgctggcacacgccccagacacagccctgaggaaagaagaaagggaccagatgccaggactcgcttttatggacattcctgcctgctgggcgcggtgataagacatttgcatgcatatgctttactctgtcctaataatttcttcaaaagacacacaggaatgtaatttaagtgagagaaaccggtcagaaaaagccacatagtttatgaggtcatttacatgaaatatccagaataggtaaatctataggagatggagaagaaagcagatccatggctgggggtggtgggagaggagggcaaggcatggtggcgtactgctctctgtggacttgttcgtgttagacacggtgggctcgttcgtgttagacacggtggactcgttcgtgttagacacggtgggctcgttcgtgttagacacggtgggctcgttcgtgttagacacggtggactcgttcgtgttgtgttagacacggtggactcgttcgtgttagacgcggtggactcgttcgtgttagacacggtggactcgttcgtgttgtgttagacacggtggactcgttcgtgttgtgttagacacggtggactcgttcgtgttagacacggtgggttcgttcgtgttagacacggtgggttcgttcgtgttagacgcggtgggttcgttcgtgttagacgcggtggactccttcgtgttgtgttagacacggtggactcgttcgtgttagacacggtggactcgttcgtgttagacacggtggactcgttcgtgttagacacggtggactcgttcgtgttgtgttagacacggtggactcgttcgtgttgtgttagacacggtgggctcgttcgtgttgtgttagacacggtggactcgttcgtgttgtgttagacacggtgggctcgttcgtgttagacgcggtgggctcgttcgtgttagacgcggtgggctcgttcgtgttgtgttagacacggtgggctcgttcgtgttgtgttagacacggtgggctcgtttgtgttgtgttagacacggtgggctcgttcgtgttagacattgcccattgacttcctcagtggatgtgaggaatgggacctgagacattgctgtcccttcgtttcctcccttcagtctcccaatattaaataatatccaagtacattacaatagtatgcaattgtatagacaagtattgtaaatactattgcatattgtatattattgtattttattgtctatgtaatatatgcgataaaaccccacactaatgggatgcattgggctccaaggatggagcaggatggagcctcagcgtgtaagtcaggacgtctcagcatgtgctggccatgggtttcccggtatttacaacatttgcttgaatcagtattccatgattacatgataggatataatatatataataatcgtttcaaatagcctgaaggaggatggggaaagttcccaacacagaaaggatgcatgtttgagaagatgggtgtgctacttaccctgatctgattactatatgtatatacacatatagtgcatatatgtaaacctacatctatacatacatgtgtatgtacatatacacgtgtgtacatacacacgtgtatatgtatgtatatgtatatatgtatgcatgtgtgtgtgtgtgtgtgtgtgtgtgtatacatatgtatacaaatacatgtacataagcgatcccctcctggaattgcttgagcccaggaggtcaagtctgctgtgaggtaagattgcaccactggccgggcacggtggctcatgcctataatcccagcactttgggaggccagggtgggcggatcacaaggtcaggagttcaagaccagcctggtcaacatggtgaaacaccatctctactaaaaataccagaaattagctgggcatggtggcacgtgcctgtaatcctagctactggggaggctgagtcaggagaatcacttgaacccgggaggcggaggttgcagtgagccaagatcacgccactacactccagcctgggcaacagagcaagactccatctcgaggaaaaaaaaaaatgatattgccccattgcactccagactgacaacagagcaagaccctgtctcagaaaacgaagaggaggaggaaaaaaaaagtactaattatctgaaattccaatttaaccaggcatccagtgttttatctggtaaccctcattcttacacacacacacacacacacacacacacaaaggcgggatagttgtcattcccactgtaaacataaggaaactgggcagaggccaagcaaccttgtgtagctcacatagcaagaagtgggtgaacccagctcatgtcttgactctgagctcagagagtgacaacttgtcaccagcgcccccatagccaccaccctttgtccaccccaggctccctctgcaccccaacgcaagctccggccgcttctctgtccccctcctcctgccgcatcacagcccacctcagcctctttgtaggtttccatgcgacgctgtaccatggctgggagtcttccaggcgccgtgctgagcgccttctgtgcatggactccaagtcgccataatcgtacgggttacccaccattatcagtcccctcttatacatcaggctagtgagacagtatcttatccacagtcctacagctggcaggagtagattcaaaccctagcagcaccaattagtggtaaagagtgtggacttgggaacttacaggagtagagagcacagtggtggttaccggggcggtggggtaaggtttggggagatgttggtcagaggaggacagtttcagttggacaagaggagtatgtcttggagatctactgcacatcatggtgactgtagttaataacaacatattgtacacttgcatatcaccgatagtagattttaaatgttctcaccggccgggcgcgctggctcacacctgtaatcccattttgggaggccaaggtgggcggatcacctgaagtcaggagttcgagagcagcctgaccaacatggtgaaaccctgtctctactaaaaatacaaaaattagcggggcgtagtggcaggagcctgtaatcccagctacttgggaggctgaggcaggagaatcgcttgaacctgggaggtggaggttgcagtgagccaacgtcatgccactgcgctccagtctgggcaacagagtgagactccatgtcaaaaaataaaaataaataaaaataaatgagcgtggaatactactcagccattaaaaggagtgaaataatgtcttttggccaggcacagtggctcacatctgtaatgccagcactctgggaggccgaggtgggtggatcacgaggtcaagagatcaagaccatcctgcccaacatggtgaaaccccatctctactaaaaatacaaaaattagccgggcatggtggcgggtgcctgtagtcccagctactcgggaggctgaggcaggagaatcacttaaacccgggaggtggagtttgcagtaagccgagatcacaccactgcactccagccttggtgagagagcgagattccgtctttaaaaaaaaaaaaaaaaagtcttttgcagcaacttggatggagctggaaggcattattctaagtaaagtaatacaggagtggaaaacaaaaatctgtatattctcacttataagtgagagctaagctgtgggtatgcaaaggcatgcagagtgatgtaatggacttcagagactcagaagggaagggcagaagtggggcagggatgaaaaactacacattaggtacaaggtacactagtcaggtgacaggtgcactaaaatctcagaattcaccagaatataattcatccatgtaaccaagaaccacttgtatcccaaaagctactgaagcaacaagccagatgcagtaacctgtacaggccacacctgtaaccccaacactttgggaggccgaggtgggtggatcgcttgagcccaggagttcaagaccagcctgggcaacatagcggacccccgtaactaaaaaaattacaaaaacaagccaggcatgatggtgtacaactgtagttccagatactcaggaggctgatggggaggcactggttgagcctgggaggttgaggctgcagtgagccatgatcatgccactgccctcctgcctgggtgacagaagtgaggccctatctcaaataaaattaaataaataaaagttaaaacaggctgggtgcggtggctcacgcctgtaatcccagcactttgggaggccgaggcgggtggaacctgaagtaaggagcttgagaccagcctggccaacatggtgaaaccccgcccctactaaaaatacaataattagccagacctggtggcagatgcctgtaatcccaactattcgggaggctgaggcaggagaatcacttggacccgggaggcagagtttgcagtgagctgagatcatgccattgcattccagcctgagcgaccgactgagcgagactccatctcaaaaaacaaacaaaaagaaaaaaagaatacatccatggatggataatgaatgagaggttgtttatattcacagttaaccctctcatctccagtaatgcaaccatcttcttcctgcttagccttttggagatgctgtccctttagtggtcaaattctgaagaaatcaggaaataatgcattcgacatgcccagcacaagtgaagatcaggcagcagaaatgcattcgacctgccacccatccatcaggagactatttactccactactgtaggggatactgacaaattaaatccatacctagtccagatatcaattccacaatttttttttttttttttttgagacggagtttcgctcttgttgcccaggccagagtgcaatggtgtgatcttggctcaccgcaacctccacctcccaggttcaagcgattctcctgccttagcctccagagtagctgggattacaggcatgtgccaccacacccggctaattttgtatttttagtagagatggggtttctccatgttggtcaggctggtctcaaactcccgacctcagatggcccacccgcctcggcctcccaaagtgtgtaagccatggcactcagcctttttttttttttttttttttttttttgagatggaggctctctctgttgcccaggctggagtgcaatgcctgacctcagctcactgcaacttctgcctcccagtttcaagcaattctcccacctcagcctcccacgtagctgggattacaagcacccgccatcacgcccggctaatttttgtagagatggggtttcaccatgttgaccaggctggtcttgaactcctgacctcaggtgatccacccacctcggcctcccaaggttgagattacaggcgtgagccactgtgcctggcccacattttttaaaaaaggggcaactgcagtgtagtagaacaaagttgtgaccaatgctaggatactctgttcatttcctgacccagccatgaatacactggaataactcatgcaaaatgccagctcgctggccccccgtttccccacccaacaaatgaaggggctcttacaggttcctttttgtcctgaaattcatcaccaatgcaaatttcttaaaaatcctttgtctggcagtccatgcctgtccttcagcatttcccagatctgaccctcaggactcaccaagacagaagagggcggtcggggatggagacatggttcctcagccctgtcctgagctctgtggccagggagggaagtggtgggagcctggggcacaggctcaggatgtgatgaggatgaagaatgctctcctcccttcctccaccagccccggcctttcctaattgagactcatcgagccgtagccggctcctcagtacagtgacttgcacacaagctccaaggagccgcgcttatctcctctggccagcctggcgttgcaccgtttgtccgcctgctggggcctggtctgtgttcccgtgctcccataaactccctgatgtcactaggaaaatacgcatcaaaaccacagtgagatatgacttcacaccttctggaatggctgtattttttttttttcttttgagacaaagtctcgttctttttgcccaggttggagtgcagtggcgccatctcggcccactacaacctccacctcccaggttcaagcgattctcctgcctcagcctcccaagtggctgggattataggtatgtaccacaccaggctaatttttgtatttttagtagagatggggtttcactgtgttggccaggctggtcttgaactcctgacctcagttgatccacctgcctcggtctcccaaagtgctgggattacaggcatgagccactgcacccgaccggctataattttttttaatggaaaacagcagatattggtgagtatgcagagaaattgaactgcgcgtgcattgctggcagggacgtaacatggcgcccctgctgtggaaaacagttccagcagctcctccagaagttaaacgtgggattgccataaaatccagcaattccacttcggggtacacacctaaaagaactgaaaacagggtctctaacatatttgtacacagtgttcatagcagctttattcacaatagccaaaaggtgaaaccacccacatgtccatcaacaacaatggataaacaacatgtggtatatacacacaaggtaatatcaaccagccttaactaaaagaataaaaatcagccaggcacagtggctcacgcctgtaatcccagcactttgggaggccgaggcgggcggatcacctgaggtcaggagtccgagaccagcctggttaacatggtgaaaccccatctctactaaaaatacaaaaattagctgggcgttaaattagccgggcatggtggcaggtgcctgtaatcccagctacttgggagacggaggcatgagaatcgcttgaacctgggaggcagagattgcggtaagccgagatcgcaccactgcactccagcctgggcggcagagtgagactgtctcaaaaataaaaataaggccgggcgtggtggcccatgcctgtaatcctagtactttaggaggctgaggcaggcagattgcctgagctcagcagttcaagaccagcctgggcaacacagtaaaacccccaaaaaatacaaaaaaaaaatagccgggcatggcggcaggcacctgtagtcccagctactccggaggctgagacaggagaatggcttgaacccgggacgcggaagttgcggtgagccgagatcgcgccattgcactccagcctgggtgacagagcgagattctgtctccaaaaaataaaaaatattataaaagaataaattcagatacatgctacaacgtgatggaccttgaagacattatgctaaaggaaatattccggacttgacagataaatactgcattgtgccgcttatctgaggtatcgagaggagtcaaattcatagagacagggattagaatggtggttgccaaggcctgggaaaagtggggagttactatttaatagggagcgcttaggttgaagatgatgacaaagtctgggggatccatagtggtgatggttacacaacactgtaaatgtatttatatttaatgccattgactgttttttgttttttggttttttgagacggagtctcactctgtcgccgaggctggagtgcagtggcgcgatcttggctcaccgcaacctccgcctcccaggttcaagcgattctcctgcctcagcctcctgagtagctggractacaggtgcgtgccaccatgcctagttgattttttgtatttttagtagagacggggtttcaccgtgttagccaggatggtctcgatctcctgaccttgtgatttggcctcccaaagtgctgggaatacaggcatgagccaccgcgcccggccagtgccgttgacttgtatgtgcacttacaggtggttaaaatgagaactatcagggtgttgatatctaaaaacctccctgccatcatcttccctacatctctcattcagtgaccatggttgaatgcctgccacctttcaaatattatgtcaggcactcagtattggcagttttatccattataaatgctttaagctgcatagaattttaaacgtgttaataaaagtagttataaatctttaatacataagctggctttaaaattattggtaaaataagattagaaatgtcttaagaattgttggcgtttttgtttgcacttattgaacragtggtttcatgcttatccctgcagaatactatgagatttgtcataagggttataaaactataaacccggctrggcgtggtggctcacgcctgtaatcccaacactctgggaggccgaggcaggcagatcacctgaggtcgggagtttgagaccagcctgaccaacatggagaaacgccatctctactaaaaatacaaaattagctgggtgtggtggcgcatgcctgtaatcccagatactcaggaggctgaggcaggagaatcgcttgaacccgggaggcagaagttgcagtgagccgagattgcgccactgcactccagcctgggcaacaagagtgaaactccatctaaaataaataaaaataaaacatttgttttttgtagagttggggtttcactatgttgcccaggctggtcttgaactcctcctgggctcaagcaatccaccgacctcagcctcccaaagtgctgggattacaagtgtgagccactgtgcctggccctattgggtccttttaaaagatacataaaaaatcaaatgcaacagtgaagtcaatcacccgatggcagaaattggggtgctcctggcatgtggtcggtcgaagccaaggacactgctcagcattctgcagtgcacaggacggccccgcccaggcggagaatgatccggtgacacatrtaggtgggaaggatgcacgaatgatggcgtttaggaagaatattatcacttctttcccgtaagagcaacttagagcaagaaaatggtattattcttagggccttctctcttatggaggctccaagccagggttgccatggcagaagatgctgggcttgctttttccttgagagaactgtactcaagatgatgtaamtgtcaccccgggtgccacttgggtgctttggagaagcgctcagacgcgacacgccgtgacgactccgcggcaggcagccggacctgtcctctggcgtgcggttcacgggctgtgtttatccccctggttccttcacagccaccttgggaaatacgttgcctctgaatcacgccaggcaggctctcastgtgtgtgctgcggggctggaaatcagggtgacactccgctaccgaacagcctgactaggaagccagaaagacgctgccggctttagtttgtcctttgactttccttgatatgaatgaagatagagcacttccacactgcacaacaggaaaagcccagaacgcttcctggagatagcgagggggtgatgcagcggacagctatggctgatgaccccctcacctctgactccccctccctccctgctttctgaacgcacatccatcaccaaccataggttcctgtttggggtttgctggctggaaaaaaaaaaaaaaaaaaaaggaaagctggctttctagtaaaaaccacttcctttgctcatttatcaaactcaaacgctaggagggccacctaacatcctccgtcccacgcaatggggtgtttctggagcactccggtktatcagggaccctgtcagttgccatcgcacatgtatatggggccagcccctgtgccaccgaagaggggggatattgaaaacatgttacagccaggagcggtgcccccttggttcaagcagttcttctgcctcagcctccctaatagctgggattacaggcgtgcaccatcacgcctggccactgttatgtagtttttaccacaatttaaaaaaggaaagagtgcctgggtgagtcctacgcacctattcggagaaccaaaggctttgaggttatcctcggcccacccatctgatgggagtgtttctcaaacttgcttttccgtgatctcccagtaagaaatacctactacacacacacagtctccggtcggcatgcttagggtagtcttccaattccccctcctggtatttacaccctggagtggtccrctcctcttgggctgaacctgtaacttgctcccaagcaagagcacacagcaagctcacgcacgtggttgttggtgtgattctgtttctccagattgtctccattcctccctggcttctccacagggccgctcaccatggcagccggctccatcaccrccagccagcgagagggcaagacaagagggctgacgagggacgctaccatcacagaggtcagttttgtaacctaaccacaagactaacctactgtcacttctgccctatcctactgctagaagccagtcgctacatctcccccacactcaaagggaggtggtcgcacygtggggtccactggaagttgcctaccagactcaggtcatcccaaacacaccctctagccatttggtgtggcatcggaaagaaaactaaggccaggtacggtggctcatgcctgtaatcccaacaatttgggaggccatggcggaagggtcacttgagcccaggagtttgagaccagcctgggcaacatagcaaatgttatgttgccacctctacaaataattagccaagtgtggtggcatgcacctgtagtcccagatactcaggaggctgaggcaggagaatcacaggtcgaggttgtagtgagctgtgacggcactgcactccagccttggcaacacagtaagacctcgtctctaaaaaagcaaaaagggctgggtgcactggctcacacctataatcccagcactttgggaggccaagacgggtggatcacctgaggtcaggagttcaagataagcctggccaacayggtgataccgtctttaattagccaggtgtggtggtgggcgcctgtaatcccagctactcgggaggctgaggcatgagaatcgcttgaacatgggagacacaggttgcagtgagctgagatcatgccattgcactccagcctgggcaacagagcgagactaggtggctgttctgtgtactgtgggatattgagtagcatccctggcctccccagtatctcaaatatgaaaacatgttttctatctcgattactgagcttttcggtgcctccttcggttctgcacctaagctaagagccccttcatctcaccctgatctctatccagtttctaacacagcagtcttgtaagatgcccggacttaaacggttatttcctgtgaaacaggtgaaaggggctttcatctctaaaaagtcggaacttttttttttttttgagacggaatcttgctctgtcacccaggctggagggcagtggcatgatctcggctcactgcaakctccgcctcccrgcttcacaccattctcctgcctcagcctcccgagtagctgggactacaggcgcccaccaccatgcccagctaattttttgtatttttttagtagaaacagggtttcattgtgttagccaggatggtctcgatctcctgacctcgtgatccaccgcgcccggccaagtctgaacttttgcatggcctgttgccctggtgataaactgatgccttgtttcctaaaaggaataaagccatgagttgcctttgttcagctcatgggcattcacccatgcacagaggaaaaataaaatctacgactcgggtacattttcttcttttttttttcttttaaatgagcaagtttgagagtctgcagtttggactaccatgagaattgataggaaggtgggagtcccaggcaatcccaggtcctgtagcagcagctggtggggttcccactccatgccgtgcagagcctgaactcaggatgacacctgcacctgctctctggctgggctctggcacaggaagccctcagcaaacacccccggcacagccatgccatagccagacaacagctcgctgtaccacaccatcatgggagacagcagttattctgagcatctcactgctgaagaaaccaaggctcagagaggaccatgcatgcacaaggtcccacagggacccaagaatccaccaagtgtcagacaacttgcccatgctcttcacggagcaccttggaaccctccccgacaggcaccgctggctctcctgacgtggcctgcaagtgcacggagccccttcctcctcggccattcccagtttagattcccaggggaagcatcagatggcccctctcccctgctggcagcagagcagacggaaccagccagagcccrgggcagtgctcacctgcaggccagtccactgcggccagcaccgccccctagaacctactgcgggcatggcggccgccagtcctgggtctcccggctcaggtagtgccaggaagctgcgggcatggcggacagctgtcctcggtctggaggcgccatcctggctttcaaatctgctccagaggttatctggggaggggctgctccctcacagagggagcctctaagcccaccaggcgggcactttcagcccaaagcctccgggccacctcctcatcctcagcctcgggggccggggccttctgtttgagtccatcgaagtactttccggaaacatccgccagttcctccgccacggccaggtatgtgctgggctgggcggccagctcggggctcttgaccagcagccagaagatgggccctgcaatcagcccacagggcatttagtccacactcgctcagagagaaggaaggaagccccgctccccggtcagggagctccgggtccctggagtcccacagagccctcctctagccctttccccttggctgcctccatctgcagttcccttccctggcactgcccaggcaaatcccaccagaccagggatcagaccaaaagctgcctcccccaaggagccttcctggctttgtccaggaaaatggaagctctcttcctcttggtcagccccagtcctcaccctaccccatttctcctttaataacatcttattaaatgcacctggcaccagcctcaggttaaggatytttttttggccaggcgaggtggctcaggcctgtaatcccagcactttgggaggccgaggcgggcggattacctggggtcgggagttccagaccagcctggccaacatggtgaaaccccatttctactaaaaatacaaaaattaactgggtgtggtggcggrtgcctgtaatcccagctgctcgggaggctggggcaggagaatcccttgaacctgggaggcggaggttgcagtgagctaagatcacaccattgcactccagcctgggtgacaatagcaagacttcgtctcaaaaaaaaaaaaaaaaaagggctgggcgtggtgactcacgcctgtaatcccagcactttgggaggctgaggcaggtggatcacctgaggtcaggagttcaagaccagcctggccaacgtgtgaaaccctgtctcaactaaaaataaaaacttagctgggtgtggtggtgggcgcctgcaatctcagctactttgggaggctgagacaggagaatcacttgaaccgaggaggcagaggttggagtgagccaagattgtgccactgcactccagcctgggtgacgagcaaaactccgtctcaaaaaaaaaaagacatttatttatttatttattgagacctggtgtcttgctctgtcacccaggctggagtgcagtggtgtgatctcagctcactgcaacctctgcctcccgggttcaagcgattctcctgcctcagcctcctgagtagctgggactacaggtgcacaccaccacacctggctaatttttgtatttttagtagagacggggtttcaccatggtggccaggctggtctcgaactcctgacctgaggtaatccgcccaccacagcctcccaaagtgctgggattacaggcgtggctattagcctcgccaagttaagattcttgatgccaaccaatcacccactccatgtttttcaggattataaacactagtcataaagcatgaactgcctgggggtggtggctcacacctgtaatcccagcactttgggaggcagttggatcacctgaggtcaggagtttgagactagcctgaccaatatggtgaaaccccacctctagctgggtgtggtggtgtgcacctgtaatcccagctacttggagacaggagaatcgcttgaacctgggaggtggaagttgcagtgagtggagatcatgccattgtactccagccygggcgacagagcaagacttcatctcaaaaataagtaagtaaagctccaactgtttgttccacctattctctgggcggggtcctgtgctggccctttcaaggaaggtctcgtataacccccccagtgactgtgaggtgagtcctattaaggcctgcactctgcagatgaagaaacaggctcagaggggtaacagctcttccccaggaggtgcagctggtttggggtgaagctggagttaccctgagtacagcctgactccaggcgtcagctccacggcctcttcctctgagacacggttttctcatccgccagcagggctctgcctgcttcccggrgctgttagaggctggcaggccaggtcaacrgaggaaagggacctgtgctctgtgcctcagaagacgtaggcgaggagcaggcatgaggcctcagggacggtctctgagggagggtcctgggccctgggctgagaaagcaggggtggagggctccacgtggagaccccaggctgggaggggactcaccgagtgtggtgctggagaaggtggagccatggatgcccgtgtgtctgcccagctctgtcctggccacgccggggtgcagggcgttgacagtcacaccagagcctggggaagaaagaaagagaagactgagggaggggtccagcctcacctgggaggctgtggcagcccacacccagctgtggggcttccgggcaccaggctgcttcctgcactcaaaccccatcgtccctcttgctctggaatcttagtgaagtggtcttatcttgcggagcggctctgccacatggctgctgggagccgagctttcctggagggcttcataaacccagaacgctgagcttaccccgggagcctgcatcggtgcgtggcggtgggacctaagatactgtaactctgaccagctcccagtggggctggcaccgctggtccacagaccgtctttcagaagcaaaggcctagcacagatttctcaatctcagcactgtggatgctgtgggttgggaggagtgaggggccatcccgtgcgctgtaggacattgagagcatctgggcctttaccctccagatgcccagagcaatctctccccaagccagctgtgatcactgtgtttccaggcattgacaactgcgggtcaaaactgcccctggttgagactcactggctggagccaaaaggctgagctgcctgcccaacagcagcagggaaggacatctgatccaggcagactagaccacctgggatgaacagacaatcctcagaagaacgatcgattagtgatgtctgcttcagrcaccagaagcgggcagcgtggtccacatgctctacttttgctgactctgttctggatccaccgtttggcctcccatcagcctaggatcatggaaaggccgctctaggctcagagtaaagcaagagggaggccgagcctagcgcccccgtaccttgcagccgccggctcagctccttggtgaagaggacgatggcragcttgctctggcagtaggcggctttggtgttatacttcctcgtctgccagttcaagtcgtcaaagtctatgtgcccagcaacatgggccagggacgagaggttgatgatccgcgaaggggctgaggctttcagcttgtccagcagcaagtttgtcaagagaaagtgacctggattaaggatgatgaaaaggtcacttttgactcacacctaaaatcccagcactttgggaggacgacgggggaggatcgcttgaacccatggtgcagcccctgcccaggcctcacccaggtggttaacgccaaactgcatctcgaagccgtcctcggtggtccagtgggggcaccgcatcacacccgcgttgttgattagaatgtccactcgctcctcctctggaagagaggggtggaggaggagacatcccggtgaggacagaccccagcctgatgcaccagcagaaacactcctgtgctcccacaacctgtgaatgtggcctgtgccggaaacagggtctgtgccgaagtggccatgtcaggatgcggtcattagggtgagccctaatccaatgactggtgtccttataggaagggaaaacagagacagagacacatggggagaaggccatgtgtggacagaggcaaagaccggagaggcacagctccaaggtgagggtgggccgcccccgctggaagtggaagaggctgggaggattatggcccgtctcacaggtcacagccacagggacaccgcgattcagactgccggcttccggaaccgtgagggaatgcacgtctgagggtgtaagccactgggtttgcagtacattgttacagcagctccaggacactcacacgccctccgcacctccatctaagccttgggactccttcctgccggagccccgaggccaaaaacgggaggttaccggtgggagccccggcaccgcaggcgtggtttcattcccaaacctgccacctcactcatacaagcaaccaaaggacacacagatggagactgcagcctcagtttcctcagctgtaaaatgcgctgaaccacagggccttcctccctgtaccactcagctcgggttccgtaacaaagtgccacagacaggtggtttaaaacctcacagacctggccgggcacagtggctcacgcctgtaatcccagcactttgggaggccgaggtgggcagatcacctgaggtcaggagtttgagaccagcctggccaacatggagaaaccgcgtctttactaaaaatacaaaattagccaggcgtggtggcatgcacctgtaatcccagctactcaggaggctgaggcgggaaaatcgcttgaaaccaggaggcagagggtgcagtgagccgagatcgcatcattacactccatcctgggcaataaaagcaaaactccatctcaaaaaaaaaaaaaaaaatcacagtcccagaggctggaagtcccagatcaaggtgtgggcagggctggttccctctcagggccctcagggaggatccgctctggtctctctccttggctcacaggtgaccatctcctctctccctcttcccttcctcttccctttggagctgtctcttttttttttttcatttttccttttttaattttagatttttcagacatggtctcactatgttgcccaggctggtctcaaactcttgaactcaagcaatcctcctgctttggcctcccagagtgctgcaatttcactgcccccagcctatttttttttttttgggggggggagatggagtttcactcttgtcacccaggctggagtgcaatggtgcgatcttggctcactgcaacctctgcctcccaggttcaaacaattctcctgcctcagcctcccaagtagctggactacaggcatccaccaccacaccgggttaattttttgtatctttagtagagacggggcttcaccatgttggccaggctagtctcacactcctgacctcgtgatccacctacctcagcctcccaaagtgctgggactgcaggcgtgagccaccacactcagtctacttggcctattttttatatttctttgagacagggtctccctctgacacctgggctggagtacagtggcgcaatcactgctcactgcagcctcaacctcccaggctcaagcagtcttcttgctcagcctcccaagtagctggggccacaggcatgcgccaccatgcccagctagcacgtctgtttctgtgcgcaaatctccccttttcataaggacaccagtcactggattagggcccaccctaatgacctcattttcacttcaggacctctgtaaacacccacctctaaatgaagtcacatgctgagggatgggggttcaggatcccaacctatccttgggggtggaggacacaatggaattcataatgctcccgaagtggttttcggcggggatcgtgaattaggtgtccagcgcgtaacacacagacaccatctggttctctgtgtgagaaggagggggttgcagcacacccgtcatgaataccagctctggagcaggacagacaggttcaaagcctggctccaccccgaccagctgcatgatcctggccaagtcacatcacttctctgtgactcagtttactccttgtaaaaaaaaaaaaaaaaaaaggataataacatcacctgcctggtacaactgtatacttactcattcagtaagtattttctaagcacctattactgggcactggaaatacagggtggacagcacagccgaggccccgtccgtgtggaccggacattccagtgcagctgagagccacttccactcgtgagagaatctacccgtgacagagctgcgtggaagctgacaggaggcccctctcaggaggtgacgcagaaactgggaccgggaaaatgaggcagggcccacgtgcggagacccagggaagggggatgcaggcagcaggcgcagcacgggtaaggcccaaaggcgggacagggagactccactcacagctgggcgcccaggagtgccgccagcttctggtgttttgttttggttttttttctttttttttttgagatgaagtctcactctgccacccaggctggagtgcagtggtgtgatcttggcccatggcccactgcaacctctaccgcctgggttcaggcgattctgctgcctcagcctcccgagtactgggattacaggtgcccgccaccgcaccctgctaatttttgcatttttagtagagacggggtttcaccatcttggtcaggctggtcttgaattcttcacctcgtgatccacccgcctctgcctcccaaagtgcagggattacaggtgtgagccaccgcgcccagcctgtttttttttttttctttttatgagagggaagctcactcagtggcccaggctggagtgcagtggcgcgatctcagctcacagcaacctccgccgccagggctcaaacgatcctcccacctcagccttccacatagctgaaccacaggcgcccgacaccacaagcagctacttttaaaattttttgtagaaatggggtttggctatgttgcttaggctggtctcgaatttctgagcttaggcaattcgcccacctcggcctcccaaagtgctgggattgcaggcgtgggccacagtgcctggcctgttgttttgtttatctgggaactgcctcaactttttttttttttttttttttttggacacagggtctcaccccgagtgcagtggtacaatcaaagctcactgcaggccgggcgtggtggctcacatctgtaatcccagcactttgggaggccgaggcgggcagatcacctgaggtcaaccagcctgaccaacatggtgaaaccctgtctctacctaaaacaaaaaagtagccgggcatggtggcaggtgcctgtaatcccagctactcaggaggctgaggcaggagaattatttgaaaccaggagatggaggttgcagcctgaccaacaggaagaaaccccgtctctactaaaaatacaaaattagccgggcgtggtggcgcatgcctgtaatcccagctactcgggaggctgaggcaggagaatcacttgaacccaggaggtggaggatgccgtgagccaagatcccgtcattgcaccagcctgggcaacaagagcaaaactccgtcttaaaaaaaaaaaaaaaaaatccctcactgcagcctcaacctcccaggctcaagcaatcctcccacctccacctcccaagtagttgggactacaagtgcacaccatcacgcctgcctcattgttttttattttttttttgagatggagtctcactctgtcacccaggctggagtgcagtggcgccatctcggctcactgcaagctccacctcccgggttcacgccattctcctgcctcagcctcccaagtagctgggttacaggtgcccgccaccacgcccggctaatttttttgtgtttcttagtagacacggggtttcaccgtgttggccaggatggtctcgatctcctgaccttgtgatccgcccgcctcagcctcccaaagtgctgggattacaggcgtgagcctgcacgcctgcctgattgttttgtattttttgtagagatgaggtcttgctatgttgcccaggctgatctcaaactccctgataaacaaggctgtgggtacctgcttcctggggctctttgctttgtgttctttctagtckggagctgggaagagccacagcttccagctttgtcagagtgtcatctcacaaactgatcttcccaaaacttctgtctcccaaagtgccgggatgacaggcgtgaaccgctgcacctggcctgccccagtgtggtagaatacacaccacataaaatggacgatcttcactatttttaaatccactgctgtctttattcctggctgttgatcttaggaaaacaccaagaagctggtacttgatttgctaaaaaagtcacagacacagctttacttaatcctctagagaggctgggcgtggtggctcatgcctgtaatcccagcactttgggaggccgaggtggctggatcatgaggtcaggagatcgagaccatcctggctaacacggtgaaaccccgtctctagtaaaaaatataaaaaattagccgggcgtggtggcaggcgcctgtagtcccccgccactcgggaggctgaggcaggagaatggcatgaacccgggaggcggagcttggagtgagccgagatgtgccactgtcctccagcctgggcgacaaagcaagataccgtctcagaaaaaaaaaaaaamccctctagagaatcccagaaaatagaaggaattattccatttcccggaagaggaacgtgtggctaagagaggaggcatcacctgcccaggtgtgtccagccggggtcctcactgtctcagggacctcagtgctccggacacctgtgtccacaagccagagacaggatcagaggcgccctgggtgggattgcctgggacagtgtgcatgaaggtgacagtgctgtacctggtacacagcaggtgcttaataaatgttcatccacctctgagwctctgaggcattgccctctcactgttctttgtgatctcaccgtagtgcctctcacctacccgacaacagtgccggctctttcttgatccccaagggcacagcaggggctcagtatgaatgaatgaatgaaccaacgaatgtgcacctgcacctgcctccctagggctgtgagtggcacaaggacagctctggttcatctcacacctccagcacctggtcaggtctgagatcacgtctgctaaataaatgaggtcccacaactcccccattccttgttcatttcctgagtacccgtttactgagcggggcacattgactctgaagaagaaagctttggccctttcagtgccagactagaaaagaaacaaagcagctgggcatggtggctcatgcctgtaatcccagcactttgggaggctgaggcaggcggatcacaaggtcaggaattcgagaccagcctggccaacatagtgaaaccccgtctctactaaaaatacaaaaattagccgggcatggtggcacccgcctatagtcttgggaggctgaggcaggagaatcgcttgaacccaggaggcggaggctgcagtgagccaagatcgcatcattgcactccagcctgggtgacagagcaagactccatctcaaaaaaaaggtcttgctctgtcatccaggttagagtgcagtggcacaaatacggctcactgcagccttgaactctcgggctcaagtgatcctcttgcctcagcctcctgagtagctgggactgtaggcacatgccaggatgcccggctaatttttttttttttttaatctttggtacacacaaggtctcactatgcttcctaggctggtctctaactcctgagctcaagcaatcctaagagaagagattttaaatgtggtcaccacaaaaacaggtaagtatttgaggtaatgcatatgttaattagcttgatttagccattctacaatgtatacaatgtacatcatgctgtacataatatatacaagtatacatgtcaactaaacaataaataattttagtgtattcttgagtctatttaaagatgaacaagaatagaaaagctagaggatggtcccagttttacataaaaatatataaatacacacacaaacctattakaaacaagactagaaagatccataaaagtgattctcctggggctggtgcagatcaaagttgtttagttctgtcttcttttttattgagacagagtctcactctgtcacccaggctggagtgcactggcacaatctcagctcactgcaacctccgcctcctgggttcaagcaattctcctgcctcagcaccctgagtagctgagattacaggtgtgcaccaccacgcctggctaatttttgtatttttagtagagacagggtttcaccatgttggccaggctggtctcgaactcctgacctcaagggatccacctgcctcagcctcccaaagtgctgggattaacaggcgtgagccactgtgcccagccagttctgtcttctttacattgcagtattttataaatgtcccataacaaacacatatttctttaaccatggtggggaaggcacttgatcaataaatgcttaataaggtcaggtgcggtggctcacgcctgtaatcccagcactgtgggaagctgacctgggtggatcacttgagcccaggagttggagaccagcctgagcaacatggtgaaaccccagctctaaaaacaaaacaaaacaataaaacaataattagctgtgtgtggtggcgtatgcctgtactcccagctacttgggaggctgaagtgggaggatcccttgagcccagcaggttgagactgcagtgagccatgactgcaccactgcactctagcctgggtgacagagatggatcctgtctcaaacaaactaattattcaggtagggcacggtggctcacacctgtaatcccagcactttgggaggccaagggaagcagatcacctgaggtcaggagttcgagaccagcctgaccaacatggtgaaaccctgtctctacctaaaacacaaaaaattagccaggcacggtggcgggtgcctgtaatcccagctactcaggaggctgaagcaggagaatcatttgaaatcgggagacggaggttgcagtgaggcaagatcacaccactgcactccagcctgggcaacagagcgagaccccatctgtctcaaaacaaacaaacaaaacaaagtcagccgggcgcagtggcccacgcctgtaatcccagcactctgggaggctgaggcaggagaatcacctgaggtcaggagttccagaccagcctggccaacgtggtgaaaccccgtctctactaaaaatacaaaaattagcagggtatggtagcaggcatcttaatcccagctactcaggaggctgaggtccgcgcttgaacccaggaggcagaggttacagtgagccgagatcgcgccattgcactcagcctggccgacagagtgagactccctctcaaaataayagtagtaataaataaataaagtcgttgcttgcaggctgtacaaaaaaaggcagcaactggacttggcccctaactcatagtttgccaaaactctgctctaaagtttgcttgcttcattcacttctcagagcctggccctgggagccgcctatcccagtcctcatcccacatggccagcgttctcctaccttcaatgatctttgctgcaaactctcggatagacttgagggaagccaagtccaggtgccgggcgttgacatggtgattgagggtctccccgcggatgtcctttgctgccgcctcacacttctccatgtctcggcaggccaggatgatgttgcctcctgaaaacccaggatggaaaaagatttaaattaataatccactcctgggtactgaccccagagacatgaaaacatacgtctacacaaaaacacatccaccaatgttcactgcggcattcttcacaaaagccaaaaggtagaaacaaccaaatgcccatctgtggatgaagggacaacaaaatgtggtccatccatagagatggaatattagacggccgtgaaaaggagtgaagcactggctcatgctacagcaaggatgaccgtcagaaacactgtgctcggggaaagaaaccagacacgaaagaccacacagcgtacaatcccatttacatgaattctatgtatatgatttcacacctatgaaacgcccagaataggcaaatccatagagaaagaaaatagattcttggttttctagggcagggggtggggagagggaattacagcttgatagttacagtgagcaggtttctttctagggtaacagatgttctaagattgattttaaagatggttgcatcattctgtgactatactaaacatcactgaattggtcgggcacggtggctcacacctgtaattccagcactttgggaggccaaggcaagaggattccccatcctctccttttttttttttttttagatggagtctcactctgtcacccaggctggagtgcggtggcgcaatctcggctcactgcaacctccacctcctgggttcaagcaattctcctgcctcagcctcccgagtagctgggattacaggcacctaccacaactagctaattttttatttttttatttttagtagagacagcggtttcaccatgttagccaagctagtcttgaacttctgacctcaggtgatccaccccgcggcctcccaaagtactgggattacaaataagccacaatgcccagcctccaattttttttgttgtggtaaaatacaaatcacttaaaatttatcatcttaacccccttttctttttgtttattattatttttttttttttgagtcagtctcactctgctgccgcggctggagtgctggcgccatcacagctcattcagccttgaactcctaggctcaagtgacctgggactataggtaccacctgtgccagcatgcctggctaactctggtagagatgggggtgttgctatggtgtccaggctggtctggaacccctggcctcaagtgatcctcctgcctcagcctccaaaagtgctggaattatagatgtgagccaccgagacccgccctcttagccatttttaagtgtccagttcattggtattaaaaacatttatggctgggccgggcatggtggctcacacctgtaatcccagcactttgggagaccaaggcaggtggatcacctgaggtcaggagttcaagaccagcctggccaacacattacaaacttagctgggtgtggtgttgcatgcctgtaatcccagctactcgggtggctgaggcaggagaattgcttgaacccgggaggcgaaggttgcagtgagccaagatcatgccactgcactccagcctgggcgacaagagcaaaactccatctcaaaaaaaaaaaaacaataataataattcctaatgttgtgcaaccattacaaccatccatctctcaaattgtttcatcttgccaaactaaacttccgtttccattaaacagtaactccccattctcccctcccctcctgacccctggcaagcaccattccaacttctctatgaatttaactgtaggtagctcctgtaagtggaatcataccgtatttgctcttctgtcgactggcttatttcacttcatggaatgtcctcaaggttcatctgtttcaatgcccttttttttgttttgctttgttttgttttgtttttgagtctcactctgtcacccaggctggagtgccgtggcgccatctctgctcactgcaacccctgcctctcaggttcaagcgattctcctgcttcagcctcccaagcagctgggactacaggtgcccaccacaactcctggctaatttttgtatttttagtagagagggggtttcaccatgttggttaggctggtctcgaactcctgacctcgtgatccgccagctttggcctcccaaagtactgattacaggcgtgcrccaccgcgcccggccagaatgcccttcctttttaaggctgaatcatatgcccctgtctatagaagccacattctgtttccctgttcatctgtggatgggtgcctgggttccttccacctccggactgtgaataatgctgcagtgagcatggatgtacagatatctctctgagagccaaagcaggggagattttacctctcctggccagttccaaggcggtctgcttcccgatgcctgtgttggcrcccgtcacgatgaccgtcttcccagggatggtggccttgctggggcaagccccaccggtgacatagtccctgagggtgagaagcggcacggtcagtcctgtgggcccactctcaccccacgtgcccctgactgaatgatctcaggcaaccttgtctgagctcactcacataccccaactgaaacacagacatcatcacatcacaccamgggacctctgtcatgttctccataagtggctccacccagtgtctggcgtgtggaacgccttcagcaagtgacagtcattattttataaatgctcactgcatgagattcccggccaggtgagggggcttgcrcctgtaatcccagcactttgggaggccaaagttttgggggtgggggggggcgggggcggatcacttgaggtcagragttcgagtccagcctggcaaacatggcgagaccccgtctctacttaaaatacaaaaattagccagrtgtgtagggaaaagagagattagactgttactgtgtctatatagaaaggaaagacataagagactccattttgaaaaagacctgtactttgaacaattgctttgctgagatgttgttaatttgtagctttgacccagccactttgacccaatctggagctcacaaaaacctgtgttgtatgaaatcaaggtttaagggatctagggctgtgcaggaagtgccttgttaacacaatgtttccaagcagtatacttggtaaaagtcatcgccagtctctagtctcaataaaccaggggcacgatgcactgcagaaagctgcagggacctctgcccttgaacacagagtattgtccaaggtttctccccgtgggatagtctgaaatatggcctcgtgggatgagaaagacctgaccgtcccccagcccaacacccgtaaagggtctgtgctgaggtggattggtaaaagaggaaagcctcttgcagttgagagagaggaaggccactgtctcctgcctgaccctgggaactgaatgtctcggtataaaaccygattgtacatttgttcaattctgagacaggagaaaagccgccctatggcgggaggcgagacatgtttacagcaatgctgccttgttattctttactccgctgagatgtttgggtggagagaaacatcaatctggcctacgtgcacgtccaggcatagtaccttcccttgaacttaattatgtcatagattcttttgctcacatggtttttgctgacctcattatcaccctgctctcctactacattcctttttgctgaaataatgaagataataatcagtaaaaactgagggaactcagaggccggtgccggtgcaggtccttggtatgctgagcgccggtcccctgggcccactgttgtttctctatactttgtgtcttatttcttttctcagtctctcgtcccacccaactagaaatacccacaggtgtggaggggcaggccaccccttcacaggcgtggtggtgcacacctgtaatctcagctactcagggggctgaggcacgagaattgcttgaacctggaaggcggaggttgcagtgagtcgaaatggtgccagcctgggcaacagagcgagactctgtctcaaaaaaatttaaatttaaatttaaaatgcccgctgcacgagattcccawggctgctgtacgcattaccacagacttagtggcttaaaaccacrtaagtgcatcctcctccagttcggcaggtcaagagtccaaaacatgtctcactggaataaatcaaggtattggtagagtcaggttccttctggaggctctagggaagaatccacttccagctcctacagaccgccacattcctccactcttggccccgcctccatcttcaacctgcatcctcactggaacctctcctttatttatttatttatttacttatttatttttgagacagagtctcgctctgtcgcccaggctggagtgcagtggctcaatctcagctcactgtaaccttcgcctcacaggttcaagcgattctcctgccttagcctcctgagtggctgggattacaggcacatgccaccacacctggctaatttcttttgtatttttagtagagacagagttttaccacgttggtcaggctggtctcgaactcctgaccttgtgatccgcctgccttggcctcccaaagtgctgcgattacaggcgtgagccaccacacccaacaacctctccttctatcttccatctcccctctgactgagcctcctgctccctcttataaggaccctataagactacaaggcaggaccggcacagtgcctcacacctgtaatcccagcactttgggaggccaagacaggaggatcacttgaggtcaggagttcgagaccagccatggccaacatgctgacaccccatctctactaaaaatacaaaaattagcagggcttggtggtgcacgcctgtagagtcagctactcgggaggctgaagtgggaggaccacctgagcccagggagggtgaggctgcagtgagctgtgacagcatgactgcactccagcctgggtgacagagagaccctgtctccaaaaaaaaaaaaagactacatgataatcataagatccttcacttggccgggcacggtggctcacgcctgtaaccccagcactttgggaggccaaggtggccagatcccctttggtcgggagctcaagaccagcctgaccaacatggagaaacctcgtctctactaaaaatacaaaattagacaggcgtggtggcacatgcctgtaatcccagctactcaggaggctgaggccggacaatcgcttgaacccgggaggtggaggttgtggtgagccgaggtcgtgccattgcactccagcctgggcaacaacagcgaaactctgtctcaaaaaaaaaaaagatgcttcacttaacacatcagcgagaacctctgacacgtgaggtaatgtcgtcacaccttccgaggattaggacgtggacccctctacggagtcacgactctgcccaccacacccatgtcccacagaggctaacrctggcaacaagatagtgtccagcaacaggaggctgagcaggtaaacagcactgcacccacaggagagaagggcaccatgcaatacagtggccaccagccacagaggctaatttttaagaaagtttaaattaagtaggctgggcgaggtggctcacgtctgtaatcccagcactttggaggccgaggcaggcggatcacctgagggcaggtgtttgagaccagcctggccaacatggcaaaaccccgtctctgcgaaaaatacaaaaattagccgggcgtggtggcgcacgtgtgatctcagctcctggggacgccaaggtgggaggatcacctgagcccaggaggtcaaggctgcagtgagccaagatcgcgccactgcactccagcctgggcgacagagccagattctgcctttaaaaataaacgaacaaataaataatacaaaacaacaaaataaagagtttaaaagtctggaaggaaagcaacatttacaagggcccaggctcgcccttccctccgagtgaccttgggccggtgacctggccggccagagcgcaggtttgccccactccgggcgggcactgcgggtcgggagctacggggcctggacccgggtgcgaggggcgggggtctccgccgccttcccggcccctgcgctgggggcccgccttgaccgcgcacgcggggctagaatgtactcacttgagcagcacggcggcgcctgctaccgtgcccagcgccgacagcggcagcaggtagcggctcatgccgggccggggacaggcgtcaggcgtcaggggtcggcgcggagcttgctgcacaccagccgcctgggtagctccgaggaagagcgcgcgacgcagccacaggcgagcggaggcgcaggcgcggctgggcccgcgtccggaactgggctgcgaggggcggggcgcgggcggagggggcggggatcctagggacgggacctatgagcatcggtcctgagcgctgtcacagctgggattggtggtttcaggagcctgtgggcgtggctagtccgggggcggggcctatggtttgttcgaatgacgtcacacttgccgcagcgtataaggcgctacgcagttctggagtgaaataggttcgaatcccaccactgtcaattccagactgtgaccctctgtgtgtctttcaactatatcagcctattccctcatctggaaatgtgtgtttaccttcttcatagacttttggagataatttgagaatttccatgcacagaaacaaggatctartagcctgtgggtacccaagctcctggggtcctgcaggagaaggcggctgggggcctggactcctgggtctgagggaggaggggctgggggcctggactcctgggtccaagggaggaggggctgggagcatggacttctgggtccgagggaggagggccgggtgcctggactg

SEQ ID NO: 2 - DNA, 95400 bp, Homo sapiens
agcatctcttttcatttttctttctcagcaggatagctttttgcctttcactctatgaaggagctttttttcctctgtgtataattaacataatgcccttaggtttacatgttttctgttcaatggccagctcaggctaatctctctaggttttaagtttccaaggaagagaatctgatagccsagcttcgtgcacgtgatctaccttggtccagtgatctatatccagggaagtgaggtcgtgcatctaaaacacagggcctgcccactagctcggaaatcagttcttagagaagagagtggtttgccagataccttagcatgatgtctgttacaatacctgaaatgttcattattaaacaccaaatgagaaacttttcccagttaaacttgaaacataaacattgttaaaaaaatttaaggctggaacataggtgataagacaggtattcacaaataccatagggaactagaaatcaatgttacctttttggaaagcaatttgycttgattcagtaattctgcccctgggaatctatcttaaagatttgttcagcaacatactcaaagatttacctacaaagatctttggctataaaaggagaaaactagaagcaactgaaagtctattaatggttaagtgaatatagtaagtgaataaaatgggatattaggaagtgattgtgaaaataaattattacaatcccaattgctttgatgcagccttgatgaaaatttaggtcagaggccatacatttttcttggtagctatttatgaagctgttgaaacaagggtcaatataagaaaagattagcaaatgttgacattctagttaccataaaatataattgaaatctatggtgattctgtatcttgttattacaaagtcaagtttctgtctaacactatttaccataaaggttaacaagtttcctataatatggaaaagcttgtgttagtagggctgttgattataaccttgagattgaatgtttgttgggaaatcacatttgatagacaacttaatttagaaaactgtgtttatttaaaggggtaactgtgtttgcttgagaaggttgatgtccctcatcagcctgtaatgttaatctgctgcctatgaacctctgaccagtgttcaagtgtcagataaaaaaattttcaggataaatcttttagcatcaatgtatgagggtaacagcaagactctattagaattttatagtatactctgaaaactccttcatagtatcttccagcaaaatccttcatgagaatcaatgaaattatctgtcttccatgtcaaactcaggaagagatcctaagaaactactaagttttaattatacacacacaaaattattttgttaacattgataaagcagtcatgtatgaacaaaggagaagtttcaagaggattgaaaaaagtagtccacatatgctcaaatatatggaaaatgtcaagatataatggtcagtgaaaaaccatcagaatggagaaggtggtggagacacttccctcttgctgatggtccagaagccagccttggaaggcaatcagttcttcccctgaaaagatgttcaacctcactagcattcaaagaaatgcaaactaaaacctcaatttgtccatcagaattgcaaaattatagaaatttgattatattcattgttgacaatagtgtgggacaatatgttctttcaaatgctgtttgtgggagtgtaaattggtattgcctcaatattgaaaatgcatattcccttgagccaagcaattttacttttaggaaccaatcctccagaatactcataaggctctatagagatataaccactaatattcactgaatcttaactatatgccttgtgctatgctaagtgcatataatttcatgcattaactcatttagtttttgttacaaccctatgatgcagatagctgtgtatgtattgaacacctattatatgcattgttctgagtgcttattatatgtcagggaacaaaatgaatgagcttgcatttagtagaggagacagacaataaataataaacataataaagaaagcatgctaataaattacaatataaggactatgaaaaaagaatagaaagaggcaaaagagcagtattactggtaggaggtaggaggcaggctgcagtattcaatagggtgtcaatgtaggtcattgaacaggtgagagttgaacaattgtagaaggaggagaagttgtctgtgcagatacttgggagaagtgtgatccaagcagaagggaagcctgaataaagaacctaaggtaggagtacacatggcccattctaggaatagttgggaggccagtatggggagaagagtgagggaggtgggcaagtaggaggagatgaactcagggtaaggcatggatcacatagggcctcttacaaattgtggtgccttgggcttttactcggagtgtagtcggggggccatttgagcacagtagtgacatgatatgatttatgtttataaggatctgactgtagggttgagaataggctatcagggaacaaggtggaagcaaggagacctgctgggaggtgatgcagttactcagatgagagttgttggtggcaagggccaggctgggaacactgacacctgagcacactcttaaaattggatcatgaaagaggtggggagggttaaactgatagaattagaagggattaagggtcccacttgtaatgaaggcaaataatgtacacagttgaagtaaatgaatgagaaagaatagtagtcaggttggaattttagaactcaagattttgataatggagtagctttagctgatgtcacagaccaactgtgcatgtgagtggttgaagtgaaggtccaggaaggaggggaaaaaccagggtaagatcagaaacttgaataatttccatgattgtgacaaaagcctaaaattgttacacaaaagcaaatgatactagagaattatagtactaaataatatgtattatttatacaaactgttaagcacagggacatttcaaccattgtaaaggaaaccattgtaagttggaagtatgaataaatagctgattcagactgttcattggaacaagaactgatgcaacaaacgcggatgagcctggaggacattatgttaagtgaaataaggcaggcacagaaagacaaatactgcatgttatcataagtgggagctaaaaatgttgagttcacaggagactagaactgtggttatcagaggctgggacgggcagcggcgggaggaggataggctgaggttggttaatgtgtaccaaattacagctagataggaggaaattgttctgtgtctctatagtatggtagagtgactatagttaacaataacttattgtatatttccaaatagctagaagagatgattttgaatgttcccaacacaaagaaataataaatgtttgagataatagacatgctatcactctgatttgatttttgcacattgtatacatgtattgaaagatcactctgtaccccatacatttgtgcaattactacatttcaataaaaaataaaaaatgcttctataacaaagaattaatgcaacaaatctggtaaactagaatatgtgatactgcaagaatcccatctttcctatgtacgtagttgcaaagtatcaagtcaattctctaaaacagcagtgtctagaactgtgtgcatggaaaatgatgacaattaggaagtcagaacggcattatcttttacctttttattctgacttgctttaggcttggataaattttttccttttttatggaggagaaacaatggtgaagactcaatgggacactcataaagagaagtgtggaccttttcagtataccgttggaaatcttcaacctccacatctctatccaccctgtgtttgtaacagaggaaaaaataaatattaaaaatattgttcagaattacatgatgaatattatggaagtsaaagagctttggcaattaaaatgtgtgtgtgtgtgtgcatgtgtgtgtgtgtgtatgtgtgatgggtccttacccatcaaccactcttaaccagaaccctttaaattaacattcaacctgttaataactatgtgcctggcatcacatatttataataatgaatatcttttccctcaacacactctggatgattggaactgcctctgtttcttaatctatattaaattcctcccttgcttgttcttgtactcaaggaacccctattgtctttgttaaggacctagattaatagctttctttaaaatcatgcattaaattaagagttttgtaaacctctgggtatgttactctgtcattaatgataagtacaaaaataattgcatctaatatttatagcttgctgtatgccagacactgtacaagttgctttatgtgcattatcttctcatttacccttcatgacaaacctaccaagtaggcaccattattatctgcattttcaggtgaagaaatgaaggcttacttagtcaaggtcatatggaaattaaagggcaaagaacctacacagaaacccaagtatgacagtttctcaagcacataaaagcttttaattactatcccctaatgcctcagatacatttcatagttctcagttttaatatttttgctgttgtcttgattttatttatcaatcatgcagattcattaataataaaaatattatacctggtaaagtaggcattacttatgcagccagtgaaattagcatactgagcactgattggtgagccaccgaagtaaaacttcttttcacttgcttgtgtctgttctattttccctttggtaggattcttactcccaactctgcttttatctactatcagttcatatctgcaaaagaaaaaggcttctttacataccacagagctagcattttaccttgacccactctaggttggataagcaggttttctcatgaaattgaaatggaacatgtggttaatgaaaagacagcgagttgccaaactcttcatgaggcccaggataaaatggttggatatttctatatgcaaaaaagatcctccaaaccaagattggaatttaaacccgtaaggcaagaaattcagatgactagtcatcagcattatttttgtgtgtgtgtgtgtgtgtgtgtgtgtgtgtgtgtgtataaaacagagcataccttatgatgatcacttaatcacatttgtggaagaccattttcatggcaaagcacattagattattttgatccttactggaagtggggcccagaaaaagcctactcatgttttctatgtccacaaaagtggacataggatagcagcagaggttcatttcttattccagaaaatttcttattatgaaaaataaattcagtattatctattttaaagatgaagttcgagcttttaaaatgccataaatgttgcattctcaactgtttgactcaaggtctaaacaagaccaatatttgctgagctccttctatgtgcaaaatactgcactctgttcagtaggtaatattagtaggcatttccctcaaggagattataacctattgttttactggaaaaagaacccttatatttagtttaagaaatttcatagtgatttattttacatgtcttggaaactaatagcaatatttttttgaggaagataagttgttccttctagcatttttgttttaacattagaaaagttataggacagcctattattcatagtggtttttgacataatcatgtcccacaaatagacatggtggaaagaatatgaagtgaggagctataccttgtgggtgagacagagctaatgacgaagtgggacagcccatcattgtactgcttatctactgactgaactttgattccctttacatccatgatgacagtaccattatccagtgagatggagaacacgtctgactgaaatgcaagcacaggcatgtaagtagggagtctagggatccaaaagacggaaatgttttcaacatttactgaatggtattgcttaaaggcaatatagtgtgtaggaaatttgcttgtaaaataatttctataaataacaaccaagaataccttattgcttgtactggtattgcttataaaattagacacatttcagtagaaaaatgtatctcctatatttccaactgaaaatttttgatgactttgttatgctgggagttgtcaacccagtctcagttactttcctactttcaatctcacttttaatcccttcgaatagatgatatttgggtctccttggggatgtagctagatgactaggcaagggttaatttactagtttggctttttaaaatctttcactttttcatctagaggcagaagagacatttttaaaagcaagttagctcttcttatctgaatttgcttattgcttgtcttaaaatatttggcaagggttaatcttgcttctctttccttatatgggcaccaacttcttaagtctgccctcaaaatagactactttttatgggcaaaaagtgttatttaactaaccagggtagtctgaggcaggtttgggtcagaagttctacaaaatgctttgggtaaattctcacaaattctactgattccaattaaattggatataaatgtgtcagatgcaggtaatatatatgaaaagtgaaagctgctttcagaagttatgtgatgacctggcacatcagtgtatatattgatgatgaccttttcagagacccatcagttggatcttacagtcaccaatcctctacagaccttagtttattcttgaaataacgtatctttataagctgagctcaaatgctctgtagcaaatctaagagaagtatgtatgttctttttactcttttataaattaaatcacaaatgtgtttgttcattgcatacaaacagggactcttgagaatttttgtgccagaaacacctttggcattttggtaacagatagcgaccgcttcacaaaataatgtttttaaatgtataaaacaaaacatataataatacaaaggaaaccaatcatactgaaatacagttttcaaaatattaaaataatctgtgatattattataacttttttattaaggcattaaagaataagattccatagcagacctaataacattagaagtagcaatgagcaaaaatgacattctgagatttctgtgacaattgtaatgtgaaacaaaaaaatctgtgatttctattaatgacaaagtcacaggtactggtaatactactgtggtgtgttgcctagagtcataatcaaagaaaatgatcaatttcagtgagagaaaataaagatgtaatcttttcgcattaagtccacagacccccctgaattctatccatgaacccttgggggtgggtctatgaattccaggttaggaacttctgatatacaatacatagaatattttataaagtgtttgaaatgaggcattctgtgtgtctacgtgtgagtcaaaattaatctgaatagaaaatcacttctaacatgcattacaaattatttttaataggcaaaacaattatcacaaagaagtttcctcagagaaaaacaaacacttacccctgaagcataatagaatagtaacccatttggttgtaatgttcggaaattaaaacctccttcaaagccatcaaagaaagatattttctgaattgaagcaatgaagctctgtccattgaaatatgctctgcgagatatctgtgtgccagaacaagtggagatagtgtttttgagaattatcaaatgcttaaaactatcaatgtttcacatacggaaggccttgcctgttartttctacgtaaatagtttattttcccacttctggtctatgttggaattcaggcatacacyaggagctcctctgagagatggggtttcatcttctccactgactccaacctgagtgaacaatgatgctagcacaccctctctgggtgttagatgccccacccatggaaaactgaagcaaacgaacaagtcacagaggaaccccatgcacaagagcccttctagcttaatggttcttctttctggtggtggcagaaaggaacccaaggtgtacctaggatcagagagaagctgaaaagaacttttccagcttttgagagtgataagtattgtgtctattaaaaagcttttgactgagtggttcttacaagtgagtcttctgggcatccataaccaactcccagggtttctgtctgctccagtaaattgaagtccttcttttggaactggaagcccttcatgcatcctctgaagttgatatctaggggaaggtgtgctctgagggccctggaaaagaaagtcagcctcactgatacagccatgatgatgatgttaccctgcatatgtaggctatggaatttgcatttatttatagtcatttgtaatggctttataatcattcatattctcatgctttctttgataggcacacagcaatgtctaatctttgcctatagaagagttttgttctacgtcaagccaatttcttccttacagttttcaaaatgctctaacttacattatctcattttatctttataacaattcagtgaaatagatggagatgctatgatttccctttagcagacgattattaggttgaatcataggaactaacatgttacacagaaatataatcaattcttagtaatttcacagggtttaacgtaatgaaactaagaaatgaaactaagaaataaattattctcttatgtcacaagtgatgttaggatttgaacacaggtcttcagacttttattaatccacgtcattaatgaatccattttggcattatttccaacacatctgtaatcaacaaagtttaggggagtgtcttaatgtttcattatacataatacacaaccctttggataaccttaaaaatttgtgtagctcagatgctattggagagttcaaaatgggtttaaggctaaagcaaaagtaaatggacaaatgctgttttgtcttcacacaatacacatgttccaccgttcctattattgatgagaaatactgcattagatcatgttctaagagtaatacaataattgaagaaatctgtgattacatctatgcgatgctaatttcaggaggtcctgaggactgactgcagagggcctgaaggtacatgaatgtgtgtacctgtgcctgtccctgtgtgtaaaagtagcaagtaagggtgcgtacactgttactagacctctcctggatgttgccagcccagtacattgctaggaacaaacagctacttaacaaaaagccttacctggattgtaagatttctggaggagctcctccaatgtatatatctgtaaaaggtattttcatcttttcattatccatgctcttgacatgccttctgtcaactaccaagatcattttcttatcattgtggtaaatgattgagatctgggagagataatatatagtaagccttgattaactatttaatattcagttctttgatgacttctatatattttaattctcctggtatactagctgttcttccatgcctttgtgcttgtttgttcacaaaatggggaatagatagattttcttttctcacagacttgaaaactcttgcttctacaagcagcagttcacactttctgggaaaggaggtctgtatgaagaggagccagcccaagaaaaattttgcgattagacctattgtttcctcctgctccttctgagaggattcaggaaagaactataaacaggtgccaccattctctttttttttaaaaaaacaactttattcaagtctagttgacatacaaagaactacacatattttatgtatacaatttgatgagcttggacatatgcaaacactcatatcatcttacaatcaaggtaagagacatatcacacatttcccagcatttccttgtgtccctttgtggtgtgtgtgtgtgtgtgagcatgtgtgttacgcacacttaacatgagatctatcctaaataaattttaaattagttttaactataggctccatgctgtacagcagatttcgagaacttactcacctagcacaactgaaactgtatacacattgaacagcaatttcttatttccctatcccctaacccctggtgacccctattgtattcccaagcaggtgccttctggaatctagattgcatgttaccaggtgtaatttttttggtgacacagtgagcagttctaatgaatctgcaaaaatgctagtcagagaaatagttaaaatattcttttattgtaaaccattctcatgaggctatggactttgaactgaaaagggaaatacagtctcctacccttcgcattttggttcaacttaaaagatattatgccttgtatacactttattaagttgtatatttaaaatagttaatgaaaatggatgaagtatattttcagtagtctgcacatctgtttcaaaactaaaggggattctttgtgagttctctttataaggaaaactgtgctagtattttctaaattctggataagtggtttaaaaggaaattctgtatttacttatatgtattcttgttaaatttggtggggctcaaaggataagcaaaaaaaggctgtgtatctacactctggctcattcaacaaatgtatagaagtatcctgtaggaataccaattgagatatttaagattaatagaagccttctggttaattaagcaattaaaaggaatctttcagtgacttttaaattggaacatcaacaggaaaaatacatccawtgttttaaagyaaatgttttcctagggttgagaagatgagggtccttcagttgctctttagatatgaaagttctcagtttatttaccatcctgcctgtctcatttgactgcctgattagatcaacagatctaagtataaagaacaaaaacaaaaccaaccaaactacaatgatttgtacctcatggtattttgcatcattaatttgagctttctttaacgtatcttcaagatgcacasggccacygctgaatccaaaatcatagaacacatgtaggtaaccattgcgcatttccagtctgaaaaacatactctgaggagagaaagraattgtaagataggaacatctgttatgcgagtagagtcagatttagctgaatttgagaaataagactgtattctttattactggaactatttgaagactaagaaagtctcatgaaattcttatgaaataaaagtgacagtgtctgggagtggtggctcacacctgtaatcccagcactctgggaggccgaggcaggtggatcacttgaggccaggagtttgagaccagcctggccaacatggcaaaaccttatctctactaaaaatacaaaaactagccaggcgtggtggtaggcacctgtaatcccagctactcagggggctgaggcaagagaatcgcttgaacccgggaggtggaagttacagtgagccgagatcgtgacactgcactccagcctgggctacagaacgagactctgtctcaaaaaaaaaaaaaaaaagtgacaactacttccatatcagcagctatttctcttattaatacataaaagttaatatttatacacagtgtaaaaattcttctgttttcattctactttctgaactaatggatgaagttttaagtctacattattgccttttaagaaaatcttgaaaatagagtatagtataccatgtttattcaactgccttgtctttaggaaacttttaaaaattataacaggccaacagatgtgtctgcatttattttaggtgaaaattagtaaaattaaaaaataatttcaaggtatactgaaaagaattcttccatattatcagcaaatatggatttaaaaaaagaaggccattgctgtattgttttgaaacactggatttatgtaaataaatatagaattattatgcacttggaacacatgatgtttaagaatcaaagaaattttgtaacactcaaataatttactggagttttgcttgtttcagaagatagttcatagatacaagaagtcaatggatttgaaaaataaagcattgtggcaaggtccctattctataggaagtgatctcctgagtggagtttgtacattcctgggagtgtggaaagcagcctactggagtttaggaagaaaatatttcaacttctatttatactaatttaaaaaaacctgaaatagagaagaaaatatttcaacatccatttatactcactaaaaaatctaaaatagagaaagaaactaacttttaatatttaacacatgaattattgactctgggccttcattttatccttttgtcagactttcacaaaattcacataatatgtgtggcttcccaagaggggttccacacttgaagagttgaaggtagctcctcatccatttctttgcttctagcctattgcaatttattgcagtttacgtgtggctagttatatggatttaaggctgatataaccgaaataatagaatatttacactcattttgtattgagatgtagagtgatgtgaaaacattttgagacacacagatatttgctggctacttcctacaaatttctgaaaatgctgttaagtttatagagggttacacatttttctttgtaacatgaattattctaaatttgttgaactttattcgtgatgacaaatgtctgacagtagtatgaatcctactagttatttcaaaaaagaaacatactgtcacatcaatgtaagggtattatcataataatggatgagaaagtaactttttctccttttttttgaggacggttatactgtggagagatggtttttaaaaaatatgtttgggaatttttctattgttgcttttgttgatgggaacaatgtaaatgcaatcctacaaaaactctcctatcagctctattaaaacatttgagggaagaaatttctaacctttagaaaaatatttcaaataaagattttcaatagctttgaacccttttattaaagtttacaaaatgatacctggttagcttacaagaactaatattagaaaaaaggaaatacaccaatcaaatctcaaagacaacctttgccacttggtgaatgtgattgaaaactatttgagttagtaggcacagctaatgatatggttctttcattttttatttttgtgaggtgtcttgtctagttacaaccaccaataaaattactgttgaaataaactggacttaggacaagacttttgaatcactgtgtcacaaagagtttaaggatttttgaaaatatttagcatacttaattacattttctcactaaaactattttctttgagctgtacagtagataaagtactattaaaaataattttagtgagaaaaacatttctgtatcattaataaataagtcaatttaatcttcattttaaatatataatcttttattttatctttatataatttgtcctttattacaagctttgactgtttcatactatatttatatctgtttatagtacacatgtatcatttataaacaaagatatatatgtgtgtgtgtgtacatacatatatacttacatacacacatacatatatacaaagcatgcaagctttgctttaaaattgattagggcatatggtttggaaaagttaggagcccagtgcaaaatttctgcagacaccctgctcatctagatcttggttctaatttcctcaaagttctcttagtttatttatatccaaaaatgtactgtggggaaatgcatctcagggttgcttttatttattgctgtcattactttcctgaagaagaaaatccaatttgactttctaaactagaatttcagtttgatggcatgacacactagacctgggaaggttcctggaaacatgagtagcagaaagtaaaggaaataaaggagaagtagtaggacttgtatttttactcactccattgaccatcaggagaataaggccgttgtcagctggtgttcgaacttctatgtcaaagcgagtcacctgaccaaatttccctctccttgtgatgtctctcaccacggcataaccggagccatcgaagaagtaactggcagcccgactctgagtgaaggccagcttatctctgaaatggaaacacaacggtcatttgaacactacagtttctgttatrcttttcaagtgaagcccttttaacccattcttctaacatcttctgtggaccttacaacatttaaatgaagtcctgttgtctgcaaggaagagataaagaggtatttrtaggtatgttaaatggattgttttcttctgtatcctgtgtgctaagacaactgaagtctccagggacaccctagtctctggaatccttaatcaaggctgcaaacaagttgtttaacacttcatacttgggcatgctcatctatgatagagaacaggtgaagagttttttgcaggtatgacttatgtagtttcaaaactggcttccccaaagaaaagtttgagaacctgaatattgactcatacttgttctatctgctgctcttgcatgaatatccaagtctttagtactcttaactgtctcttaccgggcacatggcactgatgtggaggggtccatattatagatgtgcttaaagttgtacaagctgatcacatcattattcaaagtggccagttccaggcagccaacaaagccaggcaggtttaagctggtagggagctatgcaatagaaaaagtaaaaccacttgtctcatggtcatattttactcagacatcacagaacagacaatgcaactaatagtaggtcaaggagacctacccctttgtggaaatatctttctagacccgagtgtgtttatgccaaatcatttagatatggcgtaacttgtcagttgtgcaaatcttagcagagaaagtgggatttactgagcatagattatgtgctggtcataggctgtacagtgaattcatgacaaaaatcagtccttgcgccagctttgttaggtaggtattcttgttctcatataatgagagggaaaataattctcagataaattccaattatgtgcccataactagtaataatagtcctgaaattggaaccctagatcaacttcccatcttcttcgacctttcctttatcccccttcatcagatttcatactctctccgaagtctcaccccctctctcatcccagatactttatttcatacctgtattaggtgagataactgaatttttgaaaccaccactgcaaagctgaagattagatctaaactgtggtgacaccacaagctacggaccttcctgtggcaggtgggggtaatattaattacatatgcatgtatcagaatgaatgaactgatcttcaggagttagctataacttgaaagcatttgacattatgaaaatatgagtagcatagaccagatttacacatcaggtttatagattctggttcagaattctactcccccatgaactaagctcttaaagtgatatcagcaacccccaagtcattataggtttatggatttataaaaacaattactgtagatttgtaataggtcaaaatatagctgtatggctgaccttgaagttggaaggcactccaccaacataaaacactgtgtcctcagggtccaggtccagcagagagtcatctcccgaaaattccccctttttaatgaacttttcctctgctgtgctacttagactcgggactgttaaaaacacctttccatgttttcccaccctattgagataaataattttcacttgttattatataattcatagaaaatactttttaaatgtcaaaatgttaatgctccctcatcacaaaatgggtaattttgtgacactaataagcatttacaaaataccacaatcaatgagaaagagaagaaagacattccattttgaagttaattcatggattgaccaggtaaaatctaataatcagatcgtgatttagaaatgacttttttttttctttcctactaaggtgtttgggaaagaatataagaataatggaagaaaacggagcaagaataaagggaggaaaatgctatttataacatccacaggaagactgtgtatgtgtgtgtgtgtgtgcacgcacatgtgcacgttcaacaggtttcttgtgatatgtgcatatatgccctgtgtcatggattcactgtacctttcaatcttgacaatgctgaagtaagcaggccaggaactgacgggcttggagtccaggggaatctccacatctttagttcccaaattatagacgtataccagattatcatttttgattgcaagacccatatactcttttttggcctgaaatatcaagaagtaagaagtcatttaaataaaattcataagaatgaacatcatcttttttaaaggacaatcagaaatccaaatatttgggtatatacaagtgacttctggcctgaattattatccgaagctcctgtgagcaggcagtgtctcttcctttccagcctccctgtrgccacatcagagtctgctggccccatcttgctcaggctcgtggaaatttgttggctgccaggaatgggctaattttgtgaggctaacccaggaatataatacagcctgacagtaccgatcactatgcatctctaaacaggattcagcatcaaacagaataggcttctgtctttctgaaagtctttgaggtgttycattcagactcatcaaagttagtagtgtgatggtgataggaaacaatccccacaatatcccacacagagaagaaatgacttgtcctttagtcattcttttaattttgccattaaaatgagatcttctgagttaccagaatgggcattgttttggtttgtttgcctaggtggctttattttaggcaagagaaaaagcagctttccttgtaaatattattccctcctttcaaactcatgtgcttacgtttttgcttccgaggtacaggataaactgatctgcagtctcggtcagttccggccgcttcacagggggtttcatgtacaggctcagagacgtgaaggcctttaagtcatccatactggttctcgagtgcacttccacagctgactggccatcaaacatcatggagacttggatctggagtgacacaacggtttcattaaaagtgctttgcagaaatgggcagagtgctttcccgtgcttccctcattcgtgacaggggcctataaactctcttcacctccatacctgtagttatttaccacatcctcccctagttgaagagaagacttagggcagattgtgacacagtagtttaaagtggggtgaaagaaagcaaaaaaaaagtggtgactaagtagatccaagaatgaggataaatatgaattccaccatgaacagtatacttggtttgggtgaactaaacaacttgctcaagttgtctggtcagtatacaattcacaaggctcatacaatttatacaaaactaattgtttgggagaagtagaactaattttggttactaatacagctgggactttgtccctagggtcctcataaaagggacatggggtgaggctgtgagcaacatccttgcccttgtctacacagttgggaggggtctggactagctttgtagtctcagaccaggtgggctctaccacttcctaactatgtaaccttgagcaagtcacttaaccttcagtttcctcatctgtgaaatgaggataataaatttgttgtgagcatgaaatacgataactataaagtgctttccagtgcctggtcctaccattataataactgtaataatgagttcataaggtgcctcttataatggctcacagaaaggcatcacaacaaagcacaattcagtaagtgcatttctaagaggcccaatatgatatgctgagctggtctgattcagggataatttttagagtatttacaagtgtatggattgtgtatacttatgtcatttatctgaatctttccaaatgattaggcatctttatattaatttattaatattgatttggctaatgtgggtggtcagtgagctcaaggctctatttccaaatgactggagtgcagctgtcctatgttatcagttgagtaaaaactaatacttttttttttttttttttttgagacacagtctcactgtcacccaggccggagtgcagtagcacaatgtcagctcactgcaacctccatctcccaggttcaaacaatgctcgtgcctcagcctcctgagtaactgggactacaggtgtgcgccaccacgcccagccaatttttgtattttggtagagacagggttttgccatgttggccaggctggtctcaaactcctggactcaagggatctgcccaccttggcctcccaaagtgctgagattacaggcatgagccaccgcacccggccaagaccaatacatcttaataaacaagmagtgtgggggattaaagtcttacattaataagtgagagtctgagaatagtgcatgtctgcatgaaaagcatcccacttgggggcactgagtgagctcccaactcccaaaggtggggctaagtctgtctttagcaaatggtcttaggtgattaaggtcccaaagtcatactctttatagaaataatattacaagaaagcactcataaaaacctagcttttagaatgccatttcttgatgtacctttagataaaccttttttgaaaatgttcactggggcatctaaataaggtaatttgtcacaagggaccatttatcatcatttaaaagtcaggtctatttaccaagaataatcttctacattacgaaatagttgatttctaactcttctttctgtcagtaattaggaccagtagtctgctcaggccgattcttaactgagaaaataaaaccatatactttggtcataaaaagtgagtctggtctatgaatcaattaaaaaaattcaagaggtccaagaacaagctccactttgccacattgaaaagtaattgctatgtcaggagatgttcctacaaatgccagccctagttatcttctgctaagttgcttctatatgtgtcccaaaacacatatagtgtgtttgttgagtttattcctcttagccagtatgtgattcctcagttaaccctgcgggtggtcagtaaaagcttctgcataatttgtgttgtaccagataatttcttgaaggggtaggacagatgggatagattattccattatggtaattgcactaaagcagctgttaaaataacataaaatataagaacgaattgaggcttttattgaggctttacttcttttgctatattagctttattgactagtttaactctgtggtttttaaacctggctacacattagaataacctgggagctttaaagaacatacaggtactgagccctttctctacagagtctgatctattgctttcaggttgggaccaggaattggtttcgttttcagtgttcctcacgtgtttctaattagcaaatggggctgagaactactgagttggagaatacagcagaaaggtccaggctctggaagctgcccaagcagttggagctcagcttcgtgttattattaccgctgactgactgatgagtcttttcatcagttaccttgctggcaacacttctggtctgagcaatgagctctcggatcctctggatgctggcagaaacgttgcttgcaggtcgcttctgctcaaccgtacgaagctgatccaggagctgagggacaacctcggtcagatttcttactgcagttaataaaaattaatcatttaagaaaataactcaatattatatttcaagaatcagatgtagacaataaacatggattacatatggtagaactaagagaaatgatttttaatcctgcaaaattaatagtaaaacctgtaaggtacacagatgtgctttgatcagggaataggttgaggcagacatctgggccagacggactcagctagtttagggcacaggtgcatactccatttgttatataacctgtttgtgtaagctcatacttggctcacagccactattgtttgaaaatgtataactgccctgccgatgccatgcacaggatgcgtgctcttgcgcccagagaaagagagaatgccaaggccgcctgtcttgcagacggacagagggagagccagggctcaacatggctcaggcgtgctggtgcccaaagagagagtaacgctactgacccctgtaggggagagccagttgccttgaaggtaggcatgggggagccaggaactggcttgtrcctggaaagagagaaagttaagctgctaaccctgaaggcaagagcaagccgactgctcagctgtgtgtgggagcagccagagcaagcagccgagacagagcaggcagtgtgagagagcttctgatgagagagctgctgaacagaactatatttcacctgtctacatccctcaagtgttctttcagccacccacccactccactcagacctcagtatgggctcgaacctgaccccgagcatgacatttggcatagtcgtggacctaacaaagcccaaagcacagtttgtttctatttttgtgacatttatagtacttactgatctaaaaattgtatctagagcaggctttttctaaagggcagggaccacggtatatatacaaatgttcctttaaccatatagcacaggttctgcttgcatttctaatataactgatataacaggtcaagaggaatactgggaaaaaaggtaggaagattgttttccaccttttttccttttctatgttttcttcctcttctatgttttctaaacatagaaaagagcgcaagtcagatgggcttgatggctcacacctgtaatcccagaactttgggaggccaaggctggtggatcacctgaggtcaggaggttgagaccagcctggccaacatggcaaaaccccatctctactaaaaatgcaaaaattatccaggtatggtggtgcacgcctgtaatcccagctactcgggaggctgaggcgggagaatcgcttgaacccgagaggcagaggttgcaatgggccaagatcgcaccactgcactccagccggggcgacagagcgagactatgtctcaaaaaaaaaaaagcaccagtcataagaatacagcttgatgagagaaactcaaaacaaagagaatggcataaatttttccagagtttcattgactgaacagtggttcttaaagtgtggttcccagacaagcagcagcagcatcaccaggaacttgtcagaaatgcaagttcttggccctgtcccgagcccactgaatcagcagttcctggagtgggatccagcagtctgtttaacaaggcctccaggtgattctaatgcacactagtatttgagaaccattggctcagagacgaaatacttttgaggtattctctttcctaagggcagggccatggtcattaagcattagtagctgggcaagagcaagcgtcttcctagagaaaaactaaactcacattcaggagactatgtcagtgcagatcaaggaaacatcccttctctgtacttaggacacacgatgtttctccagygcaaggaatagaattaagtaaaataatagcaactatcagtttattatattgattaatacagaggtaaatatttattgtttggatcactgacaacgacatttattttagagtatactagtctttaaaaactagagataatatacttaatgaattatgttagatattgattatggaaatgtttataagacagagtccccctgctccctacaatcaattctcttagaaaaagggagccaccttatattagagtacttataaagtgtcttacattatggtatcctctttcatttcctttgttttgaaccacaaaatgctatttgagaaaagcacagtaaacaatttcaattttttgaaacttctggatgcttattggaatcacttgataagactggtaaaaaatgggaaaaaaatgtaacagatttggtacatattcccgaggcaatatcattataaatgtaataattgaatttcatataggcaaatcttttaaagacaaaattttaaaagcacttccttgagtggttacatggaagaaatgaatatatacttaaaagatcattataaaagagctattttactgttatgggaatgggtatttgtaaattggaataaaatttgtactgacagatcatatatggatttatgacctttcttaattcagatacaagtgaaggtagtattgtwtgcaaaaccatattggagaacaaaaagttctagtcatgatttgtcatgatattgacagacattgctgtttaagaagttatgaagggattggataaaaatgtgagaatggaaaaagcgaaatttcacaagtactgcctggttctaatatctacaaaataagttaggtagacatgaaaatatttcattttcatttctatagaactgtatattcaagttggccaacacgctgttcttaatagaaagctggagttatgtttggccatattcagtacttgttggtaataacctaattactcagataaagaaaaagcaatgttgcctagtagaagcaatgccatttagtaattttttttctaaaagctaagcagtattttgttaagattatttacccaacatttgattaaccttgttccctaaaagataagtcttacgttgatacaattgctaccataatttcacatagaaaaaattatgactctttaccaatccatctagtgttcatacgaaatatatgtatgtttctcatatgtatttagacaggtatagatagatagatagatgaacagtgcaaaagcttttctttttctaagctaacttctataattttcgaatccaaaacccaaatgaagaaaactgttttttgacaaaagatgtatagagtttaatggccaattccttaattagattcaaattgtgaaatttctaagtgatacctgcatccctagcagagttcactgcagtgttgtaagcagaagagtcaaaatgttgaagattctgtgaccagttggttagattgttggccatgggggcagtggcctgctgcacctccatcgtcgtcctgttggcttcctcggtgatcagtctagactgccccaggcgctgctgggcatcccctttacacagagcacagggtcattcactttgcagagaagccggatatttgttggggaacattaacacccctttaacccttgaatgaaacagatctcacattttgggctcttaagcaaaagtaagatttttggataaccatgtggctcaccgaaaacatttccaaattaagaggtaaatttaaaaagaagagtaattgtatttcctataacctggtaagaaagccatagaaaatgcacatgagattttaactcataagaggtttgtgtctgaaattaattgcaaatatcactgtcttttatgaaaaagtaggcttgtggaacacttctgccataaaaatgattctatagaagttaatcaataaagaaagatatttttttaatagaaaaaaagcaaatttcaaagagttttagtagtgaattcccatttttgttaaaaattacatctttaaaataaccatgatgtaaatttacaacaaaaaattttgtctaggggatgggattataggtgattttcttctttttttcttatctgcattttctaatatttctatgagaattatttattatttttataaaaataattataattcatttaggtgactttataacttcaaattttataaatttgaagttgtgccctaatttggttattggattggttatatgacctaatttggttattggatttctttggccccaactgtaatgtaattagaactgtaaaacaattataaatttgaagttataccatcacctaagtgaattataattatttttattataaaaataatacttaatttaataatatataaataataaataatttattaaagtgaggatatatttcatttagcctcacatattctggattctgataaatgctagtttcaatcctgaatctgcttcttactggctgtgcctgttgcagcaagttccctaaccttcatgaacctcagggttcatatcagcctgaaggcagtagtggtacttatccccatgacataaagtattaatatggttggctgtgttcccacccaaatctcatcttgaattgtaatcttccataatccccatgtgtcatgggagggatgggtgggaaataattggatcatggggacagttttccccatgctattcttgtgatagtgagttctcatgagatctcgtggttttataagtgtctggcatttcccctttgctcagcaatcattctctctcctgtcaccctgtaaagaggtgctttctgccatgactgtagttttcctgaggcctccccagccatgcagaactgttagtcaattaaacctcttttcttataaattacccagtgttggctatttcttcatagcagcgtgagaacggactaatacagctatgttgaacacttaggacaatgcccagctcacactaagcatcaataaacagtcattctgatgacggtgatgatgaggcttctccatgaaggaccactctcctggccagagctttggtgcactgtagcactgtagctaggatttgctcattctagtaaaacacccatatgctgcactagttttttaactttcactgcgcgaaggaaggcacatctgcttccaatcacatctatctaagataccactgcagtcccagattaagcaaaacgtgtgcttttgtttctctatttgggcttgttggtctccctggtttctatttggtctctgggcctgttgcttatatggtaagaatgacttgacatgtaacagagggaagctgtttacagctgggccaaagaaatccaataaccaaattagggcatattgttatgaggaaggatgttcataagaaagccattaccaaacactataaacagcatgatcccattaaaagacacacacacacacacacacacacacacacacagacacacacagacacacacacacagaggcaatgctggaaaaaaaggctctcaaatctaaaggtcacctctacgtggtgtgattacagcatttatatttagtttcttctttttgttttctagaacttttttttgtgatgaacgtattttgtcatcagaaaataacatttatgtataaaatcattgacaaacaaagaattacctaatccttccttgaaggtttaccttacactccagtgaatcaacagatgasacttcaattctctctgatgcttacctctctctgctgcttgtagttgcttaacggcatcactgagtctggttttaagggcacttttccttgctagggctccacccacacgcctgctagtgtcagccactgcttcatcactgcctgtggaagagcagcagaaagaagtactagtggagccaagatgcctcgaaaaggattccatttcaacaaggaaacttctcatttgtacgatgcagtcatctgcagtatttgcagtattctgaatactctgaacatagatcaacaattctggaaagtagcatttaaaattcgaggtacagaattgcagaacacttgtaatactgcttgtgagtgacttaggatgccatcatggttactttctttgattgaaacatatagccctgccatgactaataacaccaagcagcacaattgttaaagagctgaaaagaaaaaaatctctctctctctacatatatgtgataacgactggttataaaaataatccttgttttcttatttgtttcaataaaattttaattgcaatataacatacatctagaaaaaggcaccctttataaatgcacagcttgacaaaaatgttcacaaaatgaacacaaaacataaccggcatccaagtcaagaaaatagaaacttattaccacctttgaagctccctagagcccctgtgataacccaaagataatcacttttttgaattctatctccatctgtttgtgtctgtttttaaacattattcaagtgaggatatggtattataatcttttatatctgtcttaattattactatatagagctataatacaccttgataatgtagtttgtcttccagctttgtttttattcttcaagacagtcttggctattcttggctttcccctctcatttccatataaattctagaatattcagttcaggtactttaattaatactgaattaaatctgtagatgaatttgggagaattgtcatttttacacattttaatcttctactcaatgaatatggtatttatttatcatttatatataaattcttgtttagatcttcatttatttagatctttatgcgtagcaaccttagcttcttttatcagatttattcctatgtatttgatgctattgcaaacactgttatttttaaaagttaatttcccaatgtcgtatgtaaaattaaatcggatttttacacattgaattggtaatgtagggtgtccttgtattgtttctaatattagtggaaaagcattcaatatttccattttaattgctgaatattattttatttttcagattatggaagtttccttctattctcagtttgccgaaagtcttttttaaaagtcaaaaatcttttttaaaagtcaagtttgttaaataatttttctgcatgtagtgagatgatcatatgaatttctcctatatcctataaatgtgacaaattacaattgattttttaaatgttaaactattcttgaaatcctaaaataaactcaaattggtcatcatatattgcactttataggtgtgctagatttgatttgctaatatattgattagaatttttgcatctctttttgtgagagaatttggcttataattttcctttttaataatatccttatgtgattcaagtaaccaagttttgctggcttcataaaacaagttccagagtgctttcttgttttctattttctagaagagctcgtataaaagtggtgttatttcttctttaaatgtttaagaattcactggggcagccatctgagccttgagatttctttgtgggtagggatcgattagtggttaaatttattatacatatgtatgtacatacagttctatcagattttgtatttgcatcagttttgagagtcttttgcttataaaattgttcttgaaagcacacttgtggcacagtcactagactggttatctttgagcaaatcccaacagatcatgatgtaattacctcatcatctgaactaaaggatcaactttgccagtaattcttcatttctgtttgtgctttaattccaaagcactgagaattttgtttcttaacaaacagaaaaatagttttatcacttctaattacacttttctctttctctccaatgggattgtaaatatacactctctgacggcacccctttgctgttctattaggtagtcttgatgtgattggtttaatgttatctttcccccccagatatgtgtataatgggtggtggtgtcatgaagtacagttaaccaaatacaagcacttctttcatattttctctgggtagtgtgaagaatttgcattgcaccctgcctccttcctcttttctaatttcaattcccaaacattataatacaaacaatgttttagctcttattttgggtctcatgactgcaaaaacaaaaaaaaatactacctgatatactgagaaagaatatatttaactctatatttggagcacttgataaaaagaggaggaagaaaatcaattttgggcttgatgtttataagaagaaatgtttcataagaagtgtgttctatttggaatttactgacttgcataaatacttttcattttgcaaatgagttaagtagaagattcatttaaatagcagcttcctgagattatattgactatcaactatttgatatatartgaaaaggaaatttgggaaataaagattactgatcattgaaaggaatttggaatggagaaatgtaatctgaaattataatgtaattcagtagatgactatggtttaatttgaaaacctgaatgtacatcacaaatgtgtgtattatcaaaggaagacagtcctataaagttctaagccacacagtactaactccctgttgttgttccttttgcaaataaatacagaaagggatttggccaaatgagatcatgaaataggtgaacaggtctgcaaaatattcaaacaggctaatgcagagagatttatcagacataaaatatggaactttgaagggatgtgggtagggatcgattaatggttaaatttaaaatagaaaagttgcttttatgaggttcaataactcaataatgacaagactgagagaatatattacaagttatcaaaaagaataaaatatttaagtcactgtgtcatgaagactgacacattctgatcttcacaagaaacaaaagcaatacatagatatagcaacatttattttaaaatattttactgttaatattctaattcttcactactgatattctaatccatagagtatgttcaggatagacttacataataaattaattagacatataataattagactagagaaacaatgacactttttattgcctttgtttgcccagaaaaataaaataacagttgttttatgggaaataaataagtatctgtgtatgaaaagcaaagtgcatttatcttctctgtgtaatggctctttgcaaaagataaagaaaatgcatgattaaatgagattaattacttcaacaaaattgggtgaggtttttagtttcaaacttggcctttgtttttaggtggcagttagaagttcgctagatgatgaatttccaacctcattagtcaatgttcaaaaatccttgggaattagttcattatctcagagatgaataatgtttagtgaatttcttagtccattcgattgtttttaagagtaactcacaagattcaaaattgtctaatgcgattttgcttttatttttccttccctccctcacccttggatgtgcacacttcagcagatgcaaacactggcctttggaaatgcttcttaccatatgcttgttaggtctgtcctaaatacagtaacctatgtagaacacaaactacaaaaaaaaaaaaaaaaaagaaaagcaaataaccagatggctttgtggtaccctgtcatcctaattgactcacagtgatgactcgttccttcatgggaaacattttaaaaggacttcgaaattgttcaagaaagaggaaattttgtgcaatatagttttagtgttaagtgtattttaggacatttttcccctaaaaattggtatttatggtaagtttctattaatcagcctatttgattagcaggaatagccacagtatgtgagatagctatgtgtttccatgtagtttactacatagcattttttttttcaatcacaatttaaagtatcaaatctttgctcttttgtaacttgactctgagcaggaactactgatatgttatgtagttataatactattctttaatcctagatttggaaatctctgtctacgtgtatgaaaggagggaagcagctataaattagaaaggagataggaaagtgaagatatttactagactctgcctttgcttgcagttctctggcttgattgaggaggttctcactttcatctttatggtaaatgatttgagtatcaatcccactcaccgcctacaaaggaattgagagaagagggtaaaaatgacagcagaagaaatcagctattcatagytgaaggatttaaatgacacagtttatctgctaaacaccaagcaaaatgcatttagctttattttcacagcttaaaattaaggtcaaatatgtgaccatgaggaagtaatgcctttggcattttcaaggtaatgtttttttgggaaagattcagtgaacctagaacaaagccctggccaaggccccaccaaagtgcttgccacatagaagccacacaataaataattttgagttgaaaaaaatataaatgaatgcataaagtatcttctctatcagcaagaactaattttaaatacatattttttttttcagggactttggctaaaaaaataaactgtcaaaggaactggcatttgctgactggactacagcacatctcgaagaatctgcagactgaaaccttcaaggcattcatgaaatggtcttcccttagttcccctgccttttccactctttctgccatttggatttcacactggaagttcaagagatgacatcagaaaacagaaaagccagtgggaaaggcaaggtataaagaactttcagggaatactcacatcataaattcggtcagtggtgttcaaagcaaattctgctgtttcattggcttcactaacataattaacaatattttcatagacatttgatgcatccaaagccttctgtaccagcccgttcatatctgaactgtgcaacttcctgttaataaacaaacattgttatttctccttcttaccttcttggggaatggggccatgtttaatgcttgctttttaaatacttctaggatcacagatgcttccttcctgttattcaaagtcacctagtgtggcaaggttttcttgagggtcacacctcctctgcattcttctgtctttgctgaacagcattttggttctctgacagctgcctgtctggcagtagcagcaggaaaagggaatgacgatttaaaaacagccctctgcacttcttcttgcaggagtttgtttatgtgatggaagtcaggcagaggaatgaaccattatgatgactacctagtgcttatccaaatcagcattgttatttcctttctgtagaggaagccaaggctctaggagagtatgcagagcttggccagggcacgtattgtcaaggtttgtttcactcctgaggcctggctgcatcctgggcctcaggagtgagacagccccagcccttcctcagcacacagccccacctcagcccaccctcacccctgccctttcacacsatagtctctgcctttgcccctctctggcctgtgtaaggttcatccaacatttactgagtacccatcacacagggtacttgcacacttgcacacaggggctaataatgtgagatataacaggaataaaatatagaaatgcttggtataccatgcctggcatctgctaatcrtcagggtttattattatacctacaccatttcctgaattgggattttaaaactctatgtgtacccgcataatttattttattgacaaatacttctactgcctctgtaatataaactctaacctccacttccgcagttcgtctaaatcctttgtcttaattttattcagtcttaaatccaccaattccttatttttttttctcagtcccaaacatcgatgattagtatcatcacctcatttgtcagtaacttccagaaggtcctccgtgacccagtatatgacattgcagatcccacactggctcctgtcttcaaaccgcctgacctgttgagctcggtaattgttcctcaatctccagcatccagttccagtccctgtgtgctcccttagagggactttctctatatttctttggctacttccctctctgttaaccaagtctataatcattctaccccctctacaaaagggctgactcatccattaggcacagcgttttcatttttttttcaatcagaaggaaaaaatgaggataacaataataatggtattaatctttataccaatgcagacatgaaataaaggttttactttttctatggagaaaggaacccaccaaggcaaaagtgtctagggcctatagaagtcatggggctctgctctacagaggggagtctaatctaaatactcactacctgttcctccccacaaccccttctgagaaaatggcctcagatagcaaaatctggggaaggcagacaagaaaacattttttaaaaaagggacaaaagaaacaaaatgttacaaatatttattaatattttaaaattttgctggcgagagtggtaagatgtaccaaagatcatgaaacaaagcctttattactttgcttttaatactaggcacagaacaagtactaactcagtattcaaattaaacatgtgctattgaaatggaagcttcttaatgaattttgtttatctttgttcgagcatagcacgtaaatcattgtgtacaccagacagatatggaaggatactcaccttttgaatgaagatgtctctaagttgaaatgctttcatgaatatatagtcagaaatattctaaatrcaaaaggacttgagggtgattgatattttggatcatgtttcacgtaaagcatgtagtaaytgtcttagaatcatgctggaacactgtttgttgcagagtggcattatacacagaagttatattttggaatcccaatgaatgggatgtaggtacaaaatgacaaaagaataatgaagagagccataagatggatctcaaaaacaacattctgctaatatagtatattatcaaaatagtgttttttctaagctccattttattgccttcatcaaaagctcatgtttctagggccatgataccgagtgggatatggcactgtctcacccactgacacaccaagattttatatgacctctctctttcttttcttctctcttcgtaggagatttggaagagtgtttgaaaattttggcaatcaagaataagaaggtgatttatattttgaacagaagttaatattggttcttattttattaatgacctttactggtccttttttcctagtctttctctataatgatctcattatttgcctattatttcagggtcatgaattcaattctgatctttcagtacttttcagttaacattaattgagtgtccaagaggtgtgtgattctattctaggtgctgggaggaaaattgccaattgattttctcttaacaggtgttgaaatcaaatagttcctgctgggcactgtggagtatttatcagaagtcagttatattgccaattcccgaccagttttacttaagacacttgggtgtggaaagataatgctgtctatgaaataaataggtaatgttagaattagaccttctaaagggatctgatttatttgacaatgttttatacattgtctttggtcatcctactaaaaattgtggaacagacacccccctcttcccggaacacagacctttaatatgacagattttttttaaataaaaaagaccagctcccccaaacaattgcaatgaacaatgatggactctcagatggaacaaccaaccaaccaaccaaccaaccaagcaaccaaggaaccaaccaaccaaccaacatatcaacacataagcatacccaaccttaatcaacctggtaaaattgtatcccagtagttctgacatatggaattgaatagtaatattttattcaccccatgtagatatttgcatttctaaaaccaggatattacctgctcaattcattagcttcttgttgaaggtcctgtgcatggtcaatagcttcttggactaaatcatggctgaggttacttaggttagatagttttacttgtagttcrcttttggctccatctatttctgcataaatccctgacgcattctaaagaaaaaaattttaataaatacattgaatttagaagaacttaaaacatttttcctaggcaccaaaagataatctctgttctttcttattatgaaggtcagtaaatttcagtgcaggaccacataagtctaaaatactgtaagtatatgtctatttatcccgcattgccagctctttcttctgtattgattgcttccctagctagcattcacaacccagaaatgctctaccatttcagacctaaaaactaaaactaaactaaaaccttcaattatccacacatgtccctaatgttactacaatacttttctgctctcttcatagcaacatatttcaaaaaatggaagttgtttatatatgttgtctctattttctctcactttatatttcctattttgacctagtcctgtctgatttctactccattactctaccaaaagagaagttaattacatctaagttactaaatctaatggacatcattcagttttcatctgacctttcagttacctttcaggtgactgactacttcctaaaaatcaccttgtaacacaggctctcttggtttttaatacaaccacagacctacgattttgcttaaagatcgtgcaactgtgtagacggatgttcctgcaaacccgtgagtttcagccttggctggcccctcaatgctgcaaagagatttgttctcctagtcacccaaatagtgattctaaacattgtcatgattcctaagccaacatttccttcacccacccccatctgattgtaaacagatcactttattttcttttttatttggaggtcataaactgttagtgggggacacttcttccacacttctgatgtctcctttatatgcagggagcacagtgagtgaaactccagacctctctacccctttcctcactctactcctgtgagaggggagtggttgattttgtgggtaaatttgggaagaataactctataggctctgctcaactccacccttctttgtcctgggagcaagctgccagcagaaagcctgagttttcctgtgttcctccatgttaaaactattctgggcagaacccccatctaagccttacggtgttgcctgtctgggtgggcacagctgcttaatactgggactgaatgtcagctaccccacttggctaagagacctaaagccatgcctgctgcttagctgcttcagaaataaggcaacctccttggtctctgtatttactattttatttatgtttccacctgtttagaacttgggttctggaaagggtcactatttattggttaactccctcagagactccaaaaccaatgaacaggtatttccccagctttttgcaaccagcccccagcccttccccgcaaactctatagatgtatttatagctacacctacacaaaaatttctctccaattttaagaggaaaatgttcattttctgtataaagcatgctgccccattgtcttggtaaccccgttattcattcttgctttctagctactgactcttctcagatataaacatgctcaagtatctcccgtcaaaaaacaaaacaaacaaacaaacaaacaaaaaaccttattctttcactttaggctcccttctagctttttctcttgctttgacacagtgcactttacagaaatgtttcttgccaagatcaccaacacctggccccaaatctccagatccacttgacattttcccatccttatttactggacccatctgtggtttgctacagtgttggccactgtctttgcttaaaactcttttcttttcctagcttctgtgactatgctatctcctgggtctcctctttccctgaccaagaaagagaccgtgaaacttggcatttgactcccagccctttcctctcccctgagtgatctcacttctttctctgagggcagtctttgagtattctaatccattctccactgtcttgcaggaaaggtaatcttcctattaagaaaatctgaccatgttatttcccttctcagaatcagccagttgctttgcaggaatgagtccaatttctaagcatgacatcatcagctgaccgctcttctctcaccaatttcatcaattctcatgacccccaacctgctatatcccatggtctaatcttgaccaactggttgttgttttaatgctccacaattttttctggtctcttacctctgcaaatattttccctttctggaataattttcctttattttctgtctaatctacctggaaagctctactcctcctttcaaattcagctcaaatatcacttcctttttgaggccatccctaacctcctcaggatgagttaagtgttgccatgtgtttttattattcattcatgtgtcaaatgattgtaataattttaagtgattatttaactcatcacatcatacaatcctaggaggcaggaactgagtttaacttatttttgtaatcccagaatgtagcacaaagggtttgtagtacaaagggtttacttttatggaggcagtattaaacctctagccattttggttggtcatctggggaacaatactttgaaaaaaatgtttttaattgtataagtggaaaatagaccatggacataccacttttactcattcattccatcaacaaatattccctgtgtgctcattatggaccaggaactcttctgggggtagaatacctttgaacacagtctccactttcaaggaatttacagtttagtgggagagatacaggtaataaacaagtgatcaaacaagcaaacaagctaatttcagggagtaaaagatattttgaataacatatgacaggtggggtgggatgaggagtgagtggggtaaggggttcatttggatgtcagggtcataaggacaccagccatttgaagatctgagggcagcaggtgcagaaatcctgaggcaggaaataagtatggtatatttgaaaaatagagaggagtttgttgggctggagtgcagtgagtgagaaaagagttgggtatgtggtcagaaaagtgggtctgagctgggtcatgtagggtctcatgggccatgacaaaatgagcttgtttcttactttaagtgccactggggagtgtctatagtagaaataatgttggttatgtttttaaaggattgttctgctactgcataaagaatatgtcttgaaggacaagagtggagacagttggatcagctaggaggctctggtggcaatttaaactgtagatgaggtgacttggaccaaagagcagcagtagagacaaggaaagtggtcagaaatcaagattcaaggcctggtgtggtggctcacgcctgtaatcccagcactctgggatgccaaggcaggtggatcatctgaggtcaggagtttgagaccagcctggccaacatggtgaaaatccatctctactaaaaatacaaaaaattagccgggcatggtggtggatgcctgtaatcccagctactcgggaggctgaggcaggagaattgcttgaacccaggaggcagaggttgcagtgagccgagatcactccattgcactccagcctgggcaacaaggatgaagccacgtctcaaaaaaaataacaataaaaaaataaataaaataaaatagaaagaaagaaatcaagattcattttagagataaggagaaaggagaaagcagtagtgactctggagttttgatttgagcaattgggttgtgccatttattgagatggagaagactggggaaggagtgggttttatttaagacatgtcaagtttgatatgtctattattaatacatcatagatgagactgtgactttattacagtcgtactgagttctgacttgaaaatgtcaagttagcactcggatataggagtttggaactccgtggaggtgtcatagctggaggtataattgtgtattcattggtgtgtaattgttctttaaagccaagggagtcaatgagatcagctagggagagagtataggtagaaaagaaggcctaggaccaagcacagagccattcattatccagagcagagatcaacatggcccagtgtcaagtgcagctcaaatcttttttttttttttttttttttttgagacagggtctcaccttgtcacccaggctggagtgcagaggcaccatcacggctcactgcagcctgcacttcccgggctcaagtgatcctcccatctcagcctcctgagcagctgggactgtaggcatgcaccaccacgcctagctatttaaaaaaaaattttcttttttgtagagagggggtctcactatgtttcccaggctggtcttgaactcctgggttcaagcactttcccccaccttggcctcccagagtgctgggattagaggcgtgagccactgcaccaaaccaaagcctgttgagctgagaatatatcttacatatttaaacggttgtaaaaaaaaattaaaaacaaacaaaacccagaaaaaaataagagacagtggttgtacgtggcctgcagagcctaaaatattgaccacttagagggtgtgcagaggcgaggctagcaaagggggctgggaagaaaccgctagccagggtagaggccatgagcggtaccagagcagccaggacaagggcgccacctggtgtttagaggagggagggctgagaaagcccgggagagacaggcgggtcgctggtgacctggacaggaacagtctcagtgaaggggatggaacccccttcagaaacggccgagtataggggacagtgggagtctgggaggtagaaacagcaatgataagtcactcgagacattttgctgtgaagctgagcagaatggtagggcagaagttagaggggatgcaagctttataaaagatttttttacagggcttttttctttttgatatttaaaagataggagatagtacagcacgtttgtacgctgatggtaatgattaagtaaagaatgagaacgggatgattcagaagaaagggcataacttgaggagtgaaaccctgcaacctgttttcaaggccgggcaggagaaggaatgcttacaacggaggggaggcagaggtgtggrcacagatgcaggcgggccggcggatctggggaggaaggatgaagggagttctcttctctttgtttctaatttttcagaaagcaggaagccaagtcaccaggcagaactgatagcatgggaagtgggttcccaccagtcgcatgcagctgctctggtatggccatggtgctggggatgagtcagaaatctcaggtaggtacaacagaggaacaggcagatatggtagttaagggtattttgaaagaattattatatttgataatttgagctgcttaaggagggaagaaaggacatgagaggggtacggtaaaaaaggcagggaggtctccatgtggccagagaattactggagtgggcattctagaataagtgagataggagatggtgctctgggagggaggtgcttgaaactagggtttgggaggaggtactgttactgaggacaagatctgggtatggccataggtgggaaaacagaggtggactggaggataagcttgctggaaagggcaagttcaaggagctggaggtcagagagtcggtgacttcatccatatggattttgctgtcaccaaggagagtgatgggagtcagtttggagagaaagacagtttggtgctgaaatagtcaacggacaatcaaatgaccttaaagtgatatctttcgaaaggtaataaaatgaactaagagtaatttcatgatagttcagttcactgcattttattggaaattttctacttttacaaaatgtgacttttattgattttgaatgccagatttatcaaacacaactttatgagtgaagagtgagtaggatggatcgagagcagcattttcaatagaactctctgcaagaagttccactatattcagtggcgcaatgcctgtttctgcacaatgcttgtgccactgaatatagtagctgctagctatgtggctgctgaggacttgaaaagtggctaatgtgactgaagaattaaaattttaattttatttaattttaagtaatttaaatttaagtagtcatatgtggctggtggtcatcgtacagtgcaagaaactaaaacattcagtcatctgatctttataatgcctgctcactggttagatatgaatttattattattctgtgacactgagctgctgttgtaacctgctggaaatacaaacctgaacaagtcacgtgcgtccttacctttattatatcatcaagttctgaaagagttagacgaggtgttgtcagagagtccgcagatgtgctcagagacatgttcaccacttccatttgttccctcactctttcctgttgtttctgcgggaaggaagagtaagggagagtgaagtgaatatgtctttagggaaagcgttggggagagcagtaaatgtcaacttgctctctttggactcagacaaatctgggttcatatcccagctccatccttgctgtgtgcctttggggaatgctacctgtttgatgctgctttctcatttataatacagagataacaacagtaagaatcttgggagattagacatacggaggattattataacaccgtcatttcaaagagagctagcgccttagagagggcatttgtctctttttcccagaatataaaagaggactatggagaaaggattgaacacaggctctatatttgcagtgattggaatatgaattaattcaaaaagtatttatcatgtgccagccttgggcctgacacaaacagcccatttggacaggaacagagaatatacaaaaataatcttattatgtccttttaaaaattaaaaatggccctactattaaagcatcaaattttaatcttgcttcatacctctcagagctctttattgtaaatgctcagatgttttgagaagggaaagtaaatactaatacatgtcttgatgagtactttaatttctaccatcacttttaggttctagaggcagggacattgtgattctgaagaaatattatggggcttccaatgagtttagagtttgaaagaaacatagaaagaaactttaggagggaaaagtaaaagactcattttacaatttgagtgaaaaatgagttgaagttaccttagaaatagtaacaagtcagagttgaaatatacattatagtgtaatctagaatatcatagaaataattatagaagcctagatagagaaggaaatactttaaagctttttaagttcatcttaatgtcctttcttactccctgcagtcttttctggcttaaagaaaaggaagaatggaacccatcttctccagatatgttgttatggggtaggtgtaggtctagagacagaaaagaatcacatttgaacatcctcttaatgcaagaacatttttaaagaaacaattttccctgaatatccatcaagcctaatacagtgtgactatctgagatcaattattcttatctttacaaagactgggagttatacagcaaaagcaatactgtaaaatatgtgtattaaaatatgtaaaagaagggagttgaaaaaaggttggtattatttacctctcacagaactgttttccttttacagtgttctttaccccttctgtaagttctctctgggtgactgcgggagaacactgctaacaccctgaagtcagagacaaacttcaaagctgtgtgctaatagcactgtatataagcttatttgcagtagatgaaaaacaatatgcttcaagttaatgagtttctcccacttaccrtatatagcattagacagaaatgaataaaattagctttgaaacaaataaagatatttccacagaaaagtggtcaacttgaacaaagtaaaatgttgaaaactgataattatgaaaatgacacaattgtcactattcagcatgcttcactgtgcatattacatatgcaaaaaaatagaaaaagttccacggtcaacaacaacaacagcaacagcaacagcaacaaaaacaacaaaaaacagtcctgggaaggtaaagcttgggtatatagtaatccctaaacagtgcttttgaaggagtattttacttacttttaaactatacaatctcatgttcatctgataagwttttaatcattctgttaccctttggagatagaggtaagatgacaaaataatgtaattgctagttgtatggctactgttggtacatgtcaaaatgattaagctctgtgggtacttttttggttttgtatgataactgaaatttggggattattcttttctagcccatgctgtaggtgtaatagtgaaatgtaaaattaaaacaattaaatttgggccgggtgtggtggcacatgcctgtaatcccagctacttgggaggctgaggcaacagaattgcttgaacccaggaggtggaggttgtggtgagctaagattgtgccactgtactccagcctgggtgacagagtaagactgtgtctcaaaacaacaacaacaaacccacttaagtttgttttctaaaacacagagtcaaattccagtaaggtcagatccattcaaatctatttgtcgtaggaaagactataaataaaacattggattttaaattttgttggaaggaattaaaatttcatgatattttgcaaaagtatgcaaaagaatggtgaaagtagtgtttagtaatttagaagtccaagttaatatgaaataagagtatttgtgatcatgaagaaccagtgtacataaatcaaatctgtattacttgacagtgctccaagcatttgtccatccatctgttcatcaatagatgtaacaaatgcaagttattgtgtttggtgctaggaagatacaatttgtgcaaggctggagtgctgcccttggatgctcacggtctagtggggttagactagatgcataccatcacacacacacacacacacacacacacacacacacacacacacacacacacacagagttatgcattcagcaatcaagagtgactccaccaggcgcggtggctcacgcctgtaatcccagcactttgggaggccgaggcaggcagatcacaaggtcaggagatggagaccatcctggtgaaaccccatctctactaaaaatacaaaaaattagccgggcgtggtggcgggtgcctgtagtcccagctactcaggaggctgagacaggagaatggcacgaacccgggaggcagagcttgcagtgagctgagatcgcgccactgcactccagcctgggcaacagagcgagactccgtctcaaaaaaaaaaaaaaaaggagtgactcctagacaggaacatagaagaatatatgcttagtgtgatgaagcctggtgatcattccagtgatacaaccaatggctgcaccagtagagaggaaggaaggactccttctggcagctagtgttctttttttttttttttttgaggtggagtttcactcttgtcactcaggctagagtgcaatggcacaatcttagctcactgcaaccgctgcctcccggactcaagcaattctcctgtctcagcctcccaagtagctggtattacaggtgcccaccaccatgcccagctaatttttgtatttttagtagagacagggtttcaccatgttgactgggctgatcttgaactcctgacctcaggtgatccacctgccttggcctcccaaagtgcagggattacaggcgtgagccaccgagccagcattcttaacccagggttaaggtggactacctgaacttgcctgtcaatcttatacatgcgaacaagtgcacatttttctcatggcagggatatatatgtgtgtgtatgtgcatgtgtgtctgtgtgtgtgtctgtgtgcctgcatattccatagttttcactgaattctcaaaaggatataagactgcaggaaccactggactggaatgagtaggcgaggcactctacagagggagacacttaacctggcttaaaggctagacagaagtactcatggatgagagagatgagcaaaggagacaccatgagcaaaggcaataagtagaaaatgtgcacggtctccagtggctaagaggcagagtttgtaggaaagtcaagaaattcactggaacagtaggtggactcagatcatgggtggctgaggaatttacctttcttaagtaggaagccattgaaggcatttgatgaaggttggttacatagtttctatacatttagagataccttgaaatcgaatctggcagtaatctcaaggggagagaagctgggaccctaggcagggggcagaccaaaatatccacaagtgagacacaaaggaatggagaaatcactggagaacccagagcaggaggggctgacttagaccctggggacttggaggggagaggagaaccctggacaagaatragaaagaatgagaaaataggaaaggaaattggaggaaaaaaggtgttggttttcagcaggtaatagcaaggctaatccacgtggctattcctgcagaaagacacaaatatgaaagttgtgctgtggggctcagttttgaataaggatgcagacccacaaataaatcccttttaaggactgaagcagtgagattgggtgaagtcactgagggaagagatgggggcaaaaggggtgcaactgtggctaatgccagatccaaagatcaggaagaggaaggagaactgaggtggagcagggctttcaaattcctcaacgctatgctgttcccttcctgaaatcttgctcatgctgttcatttgtatgcagtagaagggtttgtttggtaaagttaaaatgagcactaccatctgtctgaatcaaaaatgccaaatttttggtagccatatgcatgaagtttaaaaaaatctgtataagtttatttaaaagctattctggcattcattcacttttagaactgaagtctcttcatataggcaacactgtcctcttgcttgttacatttacaaagtccactgtgttttgcacacaccctgacatttaccaaccaccagcaaatcggctggtttgtgcctaagcagatactttggttctcagttcattgactgtgtgctccccttcctgattataaaatttacaaaggacttttggaggtaagatctattcctaaaaataaatcagaagagaatggaacatgttaacacacaacatatgtgttctctagcacaaggctatgtagaagacaaagcacttggctgagatcgagaactcacaatctaaaatgagaaccaaatacagtttatcattatcggtagtattaataataggtcttgcttttttctcagcaataaacattactccctgtggctaagggcacagctgtggtctggatgggatctcctgcaggccattgcttgcccttgtcctaccaggaccggtctgggttggcaggtccacttctcatttcagggcttgcagtacggaacatagttctgggtcttcactggtgaaccctgagaattgttgcatgaggttgcagtgttgtttctgtcttacttaaatgctcttaatcttctttgggagtagaatagtgttatcctgcaggctaggggtatgggcttaaatctttcaggatgagaagaatcacttattacttagcactgaaaatgcatcttcaataaacttgggcacaatctgacaaaactacaggatccccaaattggaaagtccttaaggttttcattacatcaacccagtttttactgagttgttactttgtgtcagacattgtgctaaatgctccatgattcaaagataaagaagacagattcccttactttttggagccctgagttcaatggggaagacagattcattagcagatgatcacaattcagaaacagagctgtgcaagacatgttacaggattggagtatagggtaggtctcctggaggaagtaatgcctgaggtaagacttaaaggataagtgaggttagccagatgagtagaaaagaaaaagcggtttccattccaggcaggtgagattactggttgtgtgatattgcctgaacctaatgtgtgaggcagagaacagtaagaggtgaggctgaggaggctggtagggtcagatcagagggagtcctgaatgccacgtgaaagagcataggctgtccacaggatagtgtctttcagaggttaacagagaattgtacgttgcaacctggtacacatatataaggcagaaccgtgatgaaaccacaccttactatatatgtgtactttgatattttctattcccttgatttcatttccttttatctgtctctccttttttttttttttaaactactggttacaacccatgaaacttattttctaacccgcgaaatggctcacaagttgcagcgtcaaaagcactgttataggtgatgaggagaaatgagaggattgataagcacatgcagttgcagtcagactgtgactaaggtgagctgctctggcagggtggagaggatgttttggaaggacgcaagaatggaggagagagaaggggagactgttttggttgagaaacaatgaaagccagaactagagaagttgtagaggaatggaaaagaaggaagagagctaaaacatgtcagatagtaaacctgggaggaacctgcggttgactggatgtggaggagggaaagggggacacttcaagggtaaggagagtcccagcgactatcttaaaacagtattttgtgttatacttttattgtataagataatcatgcattcatttagcaaaaaaaaaaaaaaaaagttatcccaaccatattattctaaaaaatattggctaggggtttgctcccattagcaaacagtggtgatgagtgtaattaacttttacggaagaaattttacaaggattcttagtgaggggtaatgatggctgaaaatcaggctagagagcctagtttaagtggcttttgccagccacaatagtacataaccgaattcgtgaatttgctcataattggtttctatttgttcacagtattcttttctccctaatcttttaaaatatgtttgaacatgcatgtgtcatcctatcaaaagatggcccctcttgatgctggcggctgtgaatacatgcattgcttgaagcggacacatgaccactaccagttctcagctttgtaggtgtgggcatgcacgaattctggccccatgagatgaccatctttgcaagctatgatcacatctgggaatcctcctcaccttcctctttgcatttgcatggccttggcaattagtctccttatccctgcagctgctgaccagccagactgtgagatttgcttatcgtgcctttccaaaaattatgcatacccagaacccatggttttgagatgctttggccttctagtgctctcagtataaaaaaagctatgcattgcttacccacttgcaagaataacagacccatacacatggacacaagcatcagaactactgcgttcttatcaaagcaagaactagacaattatcctagtttcaacttgattttaggaacacacaagttagtaatttatagcaccaaaaaacacaccaatattttaaaatataagtatttaactataccaatattttaaaaaaatttatatcaacagccccttcttggtgtaccatcacactgctgatgctgaaatgcattgatggtgagtgtccgctgtacctcatggtcccgctgcctggctgctgtggccctgttcatgtcttcggcatccctgacatrgttaagggcctggtcaagtgcttcctggagatctgacaacttagcattgtagtcatccagctgctccaggacgacaggaaacagagtgcgggtctcattgtgcagccgctgccagctctcagcctggctcagtactgggaagaaatggagataaaggctcagtgtggctttctcctgttcgcttccattcctcccagcattttgcaaagttgcaaaattctcaggccatgccttctttagcaatggagattgaagctattgttcacaaaattagctccaccttttagatttgaagtaaaaaatgctactttttagagtttgggagtccctggataactgtcagttgaaagaagggtttgattagttttcccacagaggttgtgctttttgtgaaaaccatatcattatactatgcttattattatccagattattaataattttactgtgtaaaggggacttgggtatagtatggtttttactattaaaaataaccaaacttatcttgtcggtaataaggcaaaatgatgttcatacccactcattttctgtagtttctctaggcaactgtttttagttagctccactgggtcaaatccaaaccatgattttggtggaaaaaagattaaatggcaatgacatgatattcttaaactttgcatgtgtcttttattctctgctcaaaggcacatgtgttgaatatgttgaatatgttaatttctgttttcttcagggaatattagcttgtcttgttgagattttcttccatcactgtaagcagaacacaaaagttcctggctgagtatagaaagtgttggaaaatgcattctaggtggaaggaggccgagtgggagatgtgattggtcccacttctccagggaagtcttgttaaattccacaggaggtgacaagcttggaaacatctggcattgactgacatctgagctctagcctttctgagtctgactcagaactggggcctgagattcttctttggttcttactgtttctaagactttacatatttgccaccataataaacctgtatgtcagtaatgtctttctacagtatccacaataattgttagcagaagttgatagtgacagttgtaggaaaacgacctactgccctttatccctttttgtgtcattagtccctttgtaatctaatgaagccttcagactgcttcttagagtgtgttctaaaatgcatacaataaaatatatagaaattaaaaggagactaatatatttaaaaaccaaatgtaatataataatgtatatgcttctttactaatcccttaactaacaagatctaaaggtggatctaatagttaccataattttgagttattggtgaatttaaatagtgtcatgagatatcagcagcagctaaaatataatatgcaaatctgtgatttcttccattgattgtgtagattaaaccaattgtttgcagctcttccaatcaagagtggagtctatctctctactccttgagtctgggctggtcttgatcagtaaaatggatatgacattgctgagctccaagcctaggcttaagagaccgtgtgcttttcattcttgctctcttaaagctgccgttatgtgaacaacctggactagccttgttgagttaagaccccacatggagggagaggcccagccttcccggccagccccagacatctgagtgagctcaaccaatatatgtcacatggagcagagatgagctgtccaggttgaatccagcctgaattgccaacccatgaaagcatgagcaataaatggttattgttttaaatgaatacatttggggtggtttttgttttgttttgttttgggacagagtctcactctgtcaccaggctggagtgcagtgtgcaatcttggctcactgcaacctccgcctcccaggttcaagcgattctcctgcctcagcctccctagtagctgggactacaggcacatgccaccacgcccagctattttttgtatttttagtagagatggggtttcaccacactggccaggctggtctcgaactcctgaccttgtgatccacccaccttggcctcccaaagtgctgggattacaggcatgagccaccacgcccggcctgggccttgttataatagcaattgataactgatacagtgatcaagtgatagattcaataatactactgtgatttggtgcctacactcattgctgaaggaaatgttaaatttccactggaggctaaaagatattaaagtcattcatggtcttcacaacatgaatgtttctggccttgtagcattcctgccttctcaataaaatttctttaaatgtagttctgggaattggtttcctttagtcttccttctactgttttatacgtttttcaccaactgctatagattccttgtggcatctcagttgtttctcaggggctcagaattgggcctgaatctaaaaatcttggttataaagtcaagttgtcctgaatgattccctgtggccacatgtagattctaaatagttctgaacactggaaattggttgctttgattatatgttgccctaggtttaatgtctgctattggacccacaaagagggcaaacatgtgctgggtcagctatgagaggaatacacctacgttcgtaagcctcatctgcctcctcatccacgagctcccgttgggtgaaaaatggttgacggcttctaatctcttcaagcatcttctgggccaacaccagcttctcagagatttccttggggctaagttcatgctcttccccataatagagcatcttgttgttgatctctgaaaggaagaacatggtgaaacaaggcagcagggagagatgaccaggcactagaaatgcaagggagcaagggctgtgggcaaagggcagggctgatcctgaaatggaaagagagactcattcaaaagcagcgtgctagtgttcatgctgtgaatcccagcgagcatggaagctcatcatctattccacgaaggagaaagacacgaggaaaccactcttctctgcttcccatgcggggtcttcagaatgggaactggctaatgcaaagcctgctctgctctcatcctcatctggtttccacagtgatttgagaatgctaatatttagcgttaaatattgtaacttgatattcaaggcatccaaatctacagtctttgatcagccttttatataacatacttaacttggagaaaatgctcagagatcactcctgtcatgggtgagattattaatgtgtggagttattaattgtattttagacaaagatttgatcaaagctttaagcccaaatgagagcatattgatagctgtccaaatgagtctttcaaattatttcacaggctaaatacaaaatgagggtttgttataatatgatgtgagcttttgctcattgatagttattttttggcagttgctgtttgccttctagagcgtgactactctaggtcattttcaccccacttccataagtcaggtggagaattttagaactggagggaccactgaggctcaaagggattaggtgacctgtctaaatattagcagactgaaatacktctttgaatccctcattcctactacatatgatgagaaggaaggtatgtaattgtcaccttgttctactgcagctccaagaggaagcattttatcttgctggcataaatgaaattgygtgtctgtggtttactatgatctatgtggttgaccagacaagatgggtaaacaaacattggtgtcacataaatcataccaggataaggggttgtattttatgtggataatagcttgaaggtcgccagcggttattttagagatggttgggaataaggaatgacatgtaattggtgtcttacagcattccagaattatataaagggattaaacatccactcctcaagtaaagtctaaaatattaacctgcgaaataaactaaatgtaaatattttttcctcagctctagcacttgtgatgctgaattctctggcattttggtgcaagtcttatatttataattttggcctgttttagtttagctacttgcagtatagattagaaaagggaaatacagacaatagtatttttgcctttggtttttggagacgattcacacattattttaaaaatttaaaagctgttagaagttattgtttcccatttacatttcctttgcattttttcatcttttcccatgcttaaaggatcaaataagagggttcagatcctttgcaaatgaaacacttttgaatcaaaacatgggttataatagcaaaggtgaattattttctctgaatggcttactagggtcctggcatttgctgcctaaagaggcatttatttcttagttggataaggtcatgttatcttctaggttcaatctcactttttgaacaaatcaatagtaactctaaaatgctatagaaaaagaatattttgtcaggaaactcaaaaatatgagccatgagagagtatgtgagtgaggagtgtttggattgcatgtcatttgcttttattgtttataatagacatcaaaggaaacatgacaaatgattaatcttgcttttatgtatccctttgcatgcaatatgccccagtataaagacatgaatcttccactgtgggtccctttatcgctactgtgccctgggatgcacttggtgttgtcatccagcccttaatatatagtataataaaaactatggaaatgcagatactggatcttagcaaactctcacccaaggaaatcttctttatcctataacagatgaaatctgctgttttctgctggtaaattgaaggccaactattagtgcactattaaaatagtcttcaagattatcctgcatgtattgcaagtgagagcacaaattaagcaaacctccaagagggaaggtacaatcattcacaatgctttaggacaaagaaatctcccacagccccgctccttccttttcttctgggttggggcccaagcatgttgcctgattggcctttgggaaagcccatcatagaaagagcttgtgatgatttgggtcaactgatagtttactggcattctaaaagcaatgttttctctgcaaataactgagaaaaatctgtgactcctactcaactcttgcattttagagacaccacagcatgcaatctcctctgtcagaaggttattctgtgaaatgcctaaaaagggaatgattttatacattgattattgaacatcaacagatagtaagtagggatgagtgctcagaaattccagataaacaaacttgaaatgaagaccttatacaagtttaaacctataatactgtaccaacaagttcctggcacacagcaaacacttaacagtagccattatgcctactgatgttaataacataagtgtttccttgatattaaactgaaccagaagagaatatatttaccttggattttatccctcatatcatgggcttgctctaccagctgacttgcgtggttaatggtgtccatgctttccttctgaacaagttgtccttttctggaggcttgattttcctacaaataatccgtataaaggctagattaaatgtatgagaaaagaatgttgtataagcacagataggggtgggtgggcataatgtatttcctaaacgtaaatcttcctggcatgtgaaagttctataacacatgaaatcatcccaaaaataatgcatgaaaggtaatgtgatggccagttttacttttaaaaaattttttaatttttccgtaagttattggggtataggtggtatttggttacatgagtaagttctttagtggtgatttgttagactttggtgcacccatcacccgagcagtatacactgcaccatatttgtagtcttttatccctccccactccactcttccctgcaagtccccaaagtccattgtatcattcttatgcctctgcgtcctcatagcttagctcccacgtatcagttaggacatacaatgtttggttttccattcctaagttacttcacttgatggccagttttagaatgacagaatgctataaaatctggtgctattcctatatcatcagtcacagttcagtcccaaccaactgcctttcatatgtaatttattcttcraatttttactgtatctcaagttgctggactagaaaattgcccatgtctgcttatcattttgacattgtgctgactgaagagcttaaagtttcaaagagaaaattgttgaaaaaataggcagaccttgaaatgcaccatgcttccagtggctcctgggtggtccaaccactgctgaaattgaattaccacagagatttcaaggattattctcactggcctaacatgctgttttcagtgcttcattccaaattcccatcaacattgatggcacttgtgtacaaataactgctcaagcagatttggctcagcgtgaatggagctcttctccgagaagctgattccattctctcaacttgggagattctgtttcagagatctcacacagtatttgtcaaaaataatgcccaactcaaatgtggcctctgaagaaagggtttgtgtgggcgtctgtgtgtatgtgtgtgtttttgtgtgcgtggtgaaggacagaatgtgatctaagagcacagaaatgattcaaggctaggacaccaccctgtatgcacagcatgggcgacatgtacttacttttgggatttgaaggactgatctatgggttatatttaagaggaagagaagttctttagtctggcatktggtcgaatgcccacttgccttgtctgttgcttttttggctcagctctttaaaaactgctacaatacgtgaaggagctgtggggtgatctgccacacagagcgctggtagacccattatacagagtttcctgaggatagggaagtggttgttttaaacttctctcctttcatccagtattctacccagaggattatgccatgattttaccgggaacgtttttacactctccaggaataacccaagcaagtggccctctcagatggtcaaggaagagaatgcagaaatggtattataacaaacacatgcccagaggctttttattggagaagggtaatcccctccctacagagcaaggctcctgtagtcacagagcccactgtgcagcggcaatgtggtcatcagtcccttcataaactgtgggctctctgaatggacactgtcttctgagtcattatactccttcctgcaattccagtcttcttcttggcttgttccagtgctttccagaaaaacagtatttgtggtcattttaaaattaaatatgcagaaactataataaatcttaatattactcctccctgcttttaaaaaatacggacacaagcatttaaaattttagaatttttaatgagttgatctttgatccagtttaagttatatttgcaaagcacaacacccctagtttttactttggcttgatacttcagagtaaagctctattgttattcctatgtcattaaacttattattttttgatatggaaacttcagttgaagtgatgagagacagctgaaaaatgtcatgcctataagaaaacctcttctttttgacaaacgccagagggcgctaagatacaggtagatagagatatatagctattgatatactgtatatatgactggatcagtggcaaagaggaacatctattcctttacattgtaagatgactgaattgaacctatagtgatggcttatatgaatgtttatttttcctgtaactttgcctgtggaaggaaaataatgatataggcacgtgggaaaacaggtgcgcctcggtttaagaaaagctgaaattaaaaaattaccttgtaactgtaaactagttggtggtttacattacaaatgtattagtcatttgctcatctcaacagaaaattcttcttgtacatatttgacataaaagtggcaaggatgtcttggtaatatagtacataaaaggtagatgacgtgaggatgataaccaatatctagggtgatcatatattttatggttcaacctggggcatttttgcacatgaaagggagaacttttagtaattattctgggacacaagcataaacagcaacagtcctggacaaaccaatagtaggaatattggtgtgctacttcagaatttgtacagtaatatctacttctgcctacctcctaaacattaatgaccctaaattcctttccagccctgattaccctctgaattgcagattcacatctctatctgccctctgtgccatcacagatatttcacttttaaaatgtccagagtaatccattcgtgttcgtagtcttagtcatccacgtctcaggatggagcttctctctttgccatttctcacctccaactggtcaccaagtctgtttcattccacctgccactctggcctctcttcctcttttccatgaccacagtctcagttcatccttgttctgtgcaaattcttttcaaatgaaggcaagacagcaacccactgctctcttctctagaccactgtggcggtctcctaagcagtgcccctattgtcagtcttcactggctagtctatcatccacactgcagagggacgtttctaaagtgcaaatctaatcagctcattgttctgggtaaatacctgaatgacttccagagtccacaggctgaagtccccatgttcacgagcgtgtttgggaaggttcttcacaattgggcctctgacagcttcttcagcattatctcctcctctctctgccttacaatgaatcttccacaaggccacagttccagtcccaagaacttagcacgctgcttcacatctatctgttctcatagtacttaccccttgcttgggagtatctgataaactcctactcattctcaatatacaggccaatactcaccttctctgagaagcctttcctagtgtacccatgccaaaatatttcactatttcttccttagagttaccgtttagcctgtaccatgtttctcttattaaatgctgtatcataattatgtttttacttatctgtttccctgctagactgaagcatcttgaaaacagggccttattatatttcaggatacctagcacctagcacactaactgtcacaggccgggcgcggtggctcacgcctgtaattccagcactttgggaggccgaggcgggtggatcacgaggtcaggaatttgagaccaacctgaccaacatggtgaagccccatctctactaaaaatacaaaaagtagccggacgtggtggcacatgcctgtaatcccagctactcaggaggctgaggcaggagaattgcttgaacccaggaggcagaggttgcagtgagccgagattgcgccactgcacaccagcctagatgacagagcgagactctgtctgaaaataaataaataaataaataaataaataaataaatattatatacagatgttcaataatgcttctggaatagaaatgtaaacagttatccctcagcatccatgggagattggttccaggaccccacagataccaaaattcatggttgttcaagtttcttacatagaatggtgtagtatttgcaatactataacctatgcacatccccctatatatattatatctaaattacctctaatacctaatgcaatgcctatacatcacttcgttcatatggattcaaagtaatactcagcatatggtaaatttgtattttgcgttttggaactttgtggaatttttccaaatatttttaagccatgattgaatctatgaatacagagggccaactgtacttaattttctcctgcctttttggcaggaccagagatgaggttcagatgcttttgatgcttggagatagcctactttccttttagtcctgtgggtctctctgcatgagttgtcattcaggtagcttctgctgtggttcaaggagtagaagtggaggagatggtgcagtacctcctgagccgcccttggagactgtgctttgtaactctgggctctgcagtggaccttcaagatccagatggtgaggggcagcactgagattgggagagggccacatctcacctctgcytgtagcccagtgacactctgaccttgagcacagtggctctgggaacatggaaaagtagaatcttggcacgatctttggaattttcattgcagacaagatcagcagcaccaaagggagcatcttttgagcrctgggtatttatgaacacagatggatgggcatcctttaggggaatcccagacataagtggtgggaaagggctgtaggacttcccagtagaaggctggagaatttagaaagggaagttcagacaaaacccgtagctaggtggatgtaacttgtgagatttgggtcacatgaaatccatgtggcaggtaatttgcaaaaagtggtattacttatcaagttcaaggggcaatattactgatttttatacacaatgaactcctttactctatttaaagccaaatattagttactttcttgatagaaggctttctaagacacagctttccttaaatctaagaatcagtcatggacttttctagagcaagggcttgaagaatgcttaaaaagtcattaagaccagccctgggcatttgttttgaaatgtttcagcaggtttttgcaccatcaggactgtggtcagaacattatattcaataaaaatagatggaaacagctgggtgaaagttcctagtagctttatcatcaacctcctgtgttggtggtctgcccttcttgtccgggagccttttctactgtgatgttaactttcaagcgtacattatttcctctccacgaaagcctgcatttagcttacattagaagtggggaaattgtacaacaaaaggatcaggaattctgcctgggctgtgggaggagctaatcttggtgaaaacatttcctcagatgttttcttgaaaattctttcctcaagaaagaattaaggctgggcgtggtggttcatgcctgtaatcctagcactttgggaggctgaggtgagctgatcacctgaggtcaagagtttgagaccagcctggctaacatggtgaaactctgtctttactaaaaatacaaaaattagccaggcgtggtggtgtgtgcctgtaatcccagctacccaggaggctgaggcaggagaatcactggaacccgggaggcggaggctgcagtgagccgagatcacgccactgcactccagcctgggcaacaaagcgagactccatctcaaaaaaaaaaaaaaaaaaagaaaaaagaattaagatagttttagcaagtttcaaccatatctgataccaacatgaagtaacaatgagtttccacaaatatttatttcttggtatttcctttactatttaagagatttcactgctcttcaagcactagtggttggattaatatgtgccattgccgggaactagggacacaattttcatgataatctcttaaagggtttggggtccaaggtcaaaagagaatactattgttattttatttttttaaaatttttgttgatcatgagaattgtttataatgtcaactaccagttttggaaagcggcaattctgaagtactctggccagtactggtggaatatcattagaaaaaaaaaaaaaaactgtgttaaacattctaatatgctaaatatggtgcctcgtgacttagtttgtaaaattagtatagcacatggatggatgtttttccattaggctgttgcggagtgcgttgaatagcctttcacattgactctgctcatgttttaatgtttttcctgttaattcctgacagcttttacaagttgtatttttctcaatatttttctctgtctagttgtcttttttgtttatttagttgttttattggatatttgaaattttatcttgtcaaatctatctttttattgaaattctttatgttgtatttaagtgttctgttattccctttgaagatttaataagtagtttgttctattttcttgtggatttgagatttatactcaactctttaaacgggctaatttattttagtctgtggtataaagtgatggttgaaagtggttttttccctgccaaagagcgaaattgctttctcaggacaattccctttctttccatttatcatttaatgtatactttaaccaatatttaaattttatattctatataataaattttaattctggatgctctgtagctcttagtcataagatgccttggcaaacacctgaatgaccatcctaattaaacaaatcaaccgtatcaacccaccgcaaatacacagaaaattctccacaaacatagcttttcaagaaaaacaatcaaaacgagaggagacggtagagactgagtatgttaactttctccacaggtctggtcttgatttattttaaggcacatgggtcactgcattttttctgggctgtgttaagcctcagtcgtttgtgaccagccagcctcacatcagctaaatcctttctttgaaggctgtcccagaaactgaatacatacatacgtaccttttcaactaattcctctacgtcagacagaaggcttttcatcgtgttctcagcattgttgatttgtatctttcttagggcgtattggttttctctttctgacaattttgtctgcagaagaatgtgttttgagaatagtcaatgggcacaccaggttttaaaaaatgtacataaaactctttcagtgtaagaggactcagagtagagtgtgaggctcttttctcaaaatagtggggtccgcaggctgctgcagcctgatatgaagggtggggtctgcagaggggactgaggcccttaggggctaaaattctgcaagctccactcactagaccagggatgctggtcaggggctgggttgaccatggggaaagggctcctttttctaatttgtacaaaggtacaatataggctggtggtggccctgggtgtctgagctttagaattttaattttgttaggtctggaagaactgaccaacccatcagtattgatgtaaatggagtatagaaattaactttcctcattttaatgcaagtctctttatttcagacccctggctttctcctttttcattttcgaggagttgggtctaaatgcggctttactgagattacttgggagtgagcccttcaatcttgacactgacttcctgtctgccataatgattcctgtcttgaagttgtgcctttgaggaaagagaatctgagtggtttcaggaggcctggatctgggtgactcccctggsgggtagtgtcttcatgtgttccaayaggtaattttggacaagaacaatttcaaagtttagaataaaattcacaccaagattctatccaggctacaatacaatttttgtttttgcttacactttacatatttggccaactgctatggatatcatttgcacctccaaaaagcaatgagtacttagtatgccaggtactgttctaacttctgtacatatatcaattcactgaattctctcaacagctcatgagatagaggcaataattattcaggaaactgaggaattatagaggttaaataacttacctacggtcacacagctagtgggtgtcagagctgggatttgaatacaagcaacctagtttcaacgtccatgctctcaatcattttcctaaattgactaacaaagcaaaacaatgtgctggtattgaattccattttccctcagctaatgattattattttaaaaatatccttttgttgtgatagaagcccatgatttagtgggaaagaaaacttgtaaatcttagctatacaaggacctttatatagtcatcccttggtagttgtgggagattggtcccaggaccccgtggggatgctccagttcctgatacaaaatggcctagtatttgcagataatgtatgcacatcctccagaatactttaaatcatctctagattacttataataccacttataatactaacacaatgtcaatgctgtgtaaatagttgttacactgtatttttcttttttaattgttgcattattttttattgtttttataaaatatattttctatctgtgattggttgaatctgaggatgtggaacctgtggatatggagggccaactgtattactgtttttgttttttaatctgttggctgcttttaacttgtttactaggtattaaccagtagagctatgaggagaaacaaggtgtgtgtgaatgtctgcgtttgactgtgagtatgagaaaatgagagagaatgtgtgtaaataagaaggaaaggtgggtgggtggtggggtgaggagagacagagaagaagaaggatgcttctagacaaactcaaaaccttgcaaattaaggctaaggaaatggtagccttgcagtaccttttgtggtaatgacttaaacaagtaatgtatggctgcgccaaggaaataagtgtttctctttcctcagtagttttgggcatagatactagtcttttagtcatttcatttcccatataacctcttttgtagacagtagttcttgttttggcccaagctcatagttacaatcaacttttcataatttcctatgaaattacttatgttttctatgttagacctacaggtctaacaacctgtaatacaggtatgagactcagatacaaaaaggggtagaaggaattactagctgcgggcctgtgaagccaggatgaaaacagagtggaaagtagaacattcctgcgtactttgaggaggtagatggtggcgttgatttcattcacgtgcctatgagcggcggccccagaggatacgctcagcaccccggatttgccttcctcgatggagagcgctgctaaccgcagtgcatcagtcaggtcccagacgcacttatcacagcctggaggtgaaacatttcttcagaatcacaagtcaaaagcatgctaaaggcaggccgttttagcagaacataaatctctatttccttggttaataccatttttatttttgtctcatgaagagctgtaattctattcttgtcaggctttagtatcttgcttggcattagctagtgaagatggctattggctagacgctcctcctctcctattagcttttctcagtattcaggggctagcaccagccttctccccaccccagggagggcacagctcctcctcacagccccacttcctggcaggatgaacacttcagcaccgggaggtctgaggttatcgctgcgagagtcgcttcctgacatctgatgagggtaccaaagttcaggctgaacgtgggcacatggggaggcaggtcccagttcctcatcacttctcacttttcacatttgagttcctctgaccactgtcatcacctccagaacccagggccctcctgtgacacactcacaaggatggcactctgtgtttcagaactgccttgatcaccttttgcaacgtgcctgttcccgatctctttccctcagatggtgctctcttctagagacgtgataaagggagactggcgtgttaatggttgttaatatgttaatttgttatttgaagtttaacatggttttacttataagctctctcaagggaatgattcccagccagtacttcaggcttggtgggggagatgcttaggaccaggcaggcatcttgatgttcttaaattggccttgtctaggggccacctgttcaatcagggtgtaaacttggcattacttgtgcctcacatcctatggcatcttctaagatgtaatccaatggtaaggttaatctcgtctgctccgagggactgagagaccaagatacatctgtttgggggaggggatgcctactattaaaatagtttttaaaccaaaagttttgttcctagtgtaactcctcatgatttaattaacaggagagccagagaaaaccaggagagataaaaggcagttccattttgtaaagcctgaatatttacttctgctcccacttcagatttgaggtaacttgggagaagccacttaaatctcttggtatctcagtttccccaggtgttgtaaattgtttgtacgtcgtattttcagggacctgaagagacgatataggaaaaggagctgaaaagagctctgtcactgggagttgtgtttctgactttgcctttagccattaggtaagattctgaatgtaaagactggataaaatagagctatgcaaatgtaaaccacccatttgccctagggaatcaagtggaccaccaagtacttggtgcaggctccatttgctgaggtgcagaaagggttaagtccaggggtgggactcagcagtttctagagagtgatattgcatagcttttcttaatcccacacctgcagcacattagagaaagtggggttagtcaatcatgtactgttatttttacttatggttgggcagtccatgcctgtagggggttcaaaaccttcttccaagcattctccggttacactgtcacatgggcctcccccgcagttgcacactgtgggaaacaaaaacaagagacgagaaatgcacttcttaatgcttaaaatatggcaatattttcctggtttctagaaacactagctatcagtgtataattcatcaatgggaattaattacattcttccttcagactgtgtagaatctacgatacagagattacgcccttcatccgattaagctccagcccaatgagattttcaaaggtgaccctgggcaaaattgaatctaagttttctaggatttctctcccaactctttgggattctgacatgacagtgcaattgctttagtccaaaaatgtcctggtaagtttcacaagatactaaatgaccacgagctcatcattcaactggaaattgaaagccatcccttccttgcagactgatactccagtttaatttaactygggggttgatcattgccaggtgtgagggaggagcagcttagcaaggagtgagtgaggaggcccaggagcgattcttggctcccactgcgcttgacccttggcaagacagactccaaacctccaaatgacagctatgagtgcaataagaataatgtgctgcaaggaatcaggaacatttttacatgaatttagaagacgtgggagcccattattcatctactgatgattttctgtaatgccttttggaaaaagcaaaaacaaaagcccaatctcatcagactgttcaatttccactgagtttctgggtgggaactaatttgtaatatttaaagaggaattctcttaccatctatgctagcaattaactggaatagaattgtgcatttccccccacttcttaactgtctttacagaataatcataaaaaccaggttcatgggagatctatttattacatttcatctgtttaatgttccacaaaatgcagatttattaaatctttcagcaagatcatgctttattgcttctaaaattagcttctcttccaagagtgacctgcatctttatagtttaaacacaaatttagtaaatgttttgagaatcaggatgtcaacctttcaggctttgattttgccaacattatttctgctgtccgccttctctctctttagcctgactagacacagtgctccttcctttctgctgtcattctcagtgttatgcctctatgcacattgcttttttgtagacatgtttacttttattgtgacttctgcagaacatatatgttgcatttttttkatttaaaactccttactccttgaatcttttcaagtggaaatctgtttcagtgaaagaattccttatagaggcatgccacaggagtacaatatttcctgctctcccactctcccctcaaagtcacataagagtaagacatactcaatctcagccttcctgtactcttagaggaaagcaatgtcacctcacttttgaagagcttcactctatgtggcaaatggatgaataagatytgtgcgtttcagtctaactgaagcctaaccagaaagttttctatgctatctttgaaatatttacctcttataatttgaggaaattggaggatggtggtgattaaatggtacccttgacttgctaatctattttatggaaatcttgattttaccaaacataactgaacgagagatatagccctctgaataagaaaactgatttgaaccatgcaaggtttctttttctttctttctttctttctttctttctttctttctttctttctttctttctttctttctttctttctttctttcctttctttctttctttctttctttctttctttctttctttcctctttctttctttctttctctctttcagagaagaatctctctgtcacacaggctggagtgcggtggcacaatcttgactcatggcaacctctgcctccacctcctgggttcaagggatgctgggtgggactataggcacccaccaccatgcccagctaatttttgtatttttagtagagacaaggttttgccatgtttgccaggctggtctcaaactcctggcctcaagccatccacccacctcagcctcccaaagtgctgggattacaggagtgagccaccatgcctggcctgaaccatgcaagatttcattcagtctcctggttaatggcaggtaatccatagaagtccgatttatttctttgattaaaactagaaggatataagatgctaagacaaaagttcatttgttgtgtttgtgtctcctagtttattccacccatgagcaaaattatattagtagccttgataaaaatttctatccctgatgggtttgggatgcatattcctgagaatgtacattgccctgggaaagtgacaagggggcactcacaatacttccccaagagaaattcttcatctaaattcagtattggcagagggtcatgctggccaggcagctggcttagtatttatgatactgcacctgcacagttcttggctatcctggcgtccccatagtagccaggagcgcaacgttcacacttgaatccrgtggtgttgcgtaagcaattcctacactggccagtgacttcatcacaatcttcaaagatcaggttgggatctgaatttccactgcagtcacatttcttacaggtgcttccaatgagtaaggggtttccatagtaaccgggagcacatctgaagaggaatatcacacatttaaatatttagcatcatggtttttcttccttttaatcttctttcctacaaagaagaaagatgtagtggatatttattgatttccytcccagaattcatttgcactctctcatcttcttcataggaccagatttcgtttttaaggaactacccctccccattatgttatagatcatttggttcacttcatctgtaggccattcagttcagccaggcttccagctataggattgaactggtatatccagccagggaactggtgtacacaaatgatatatgatgggtgggaccagatatgccaaaggtactgcaatgagatgtacctgtagcgtacagctgggaaatgtcctagccacaacgttaatagcacctctattgagaaacattgatcagtctagtcacaatgaattgtttaagtaactaagcttgagccattcagtgcctgctattctcctggctgaaagggattgactcaggagtgtagcttgggctcttgtttgagggtcatggkgtggcattctctccatcttcaggtgaaggaagaggcagcaggtagtacgcttagctcctggcagcaacttgtaactgagcaaagccagcctggagtcaaagcagatggcagagctgagagtaccacagatcaatggagttggagcccagactgccattcttctggatgttttagatatgcgcacctacagaggccaggtgcctacctgcatttattgtgtgggcagagccagtgcctatggtcaggctggctgggcctttgatgagagagcccagctgagttggagaatggagactgaaatccatctagcctttgcttgccttgccaagctgtgcactctaggtgaggctgtctctgcccagaggaagaaatgcctttccctacttttcccaaagctgccgtgcagggcagcagaggccctgctgtgagtggtgggcctgtaggccccatgtaagggaagagctgttactaggctcaagttgattgttgccagcctagagccttgagaggatgaaggacctatgttgccatattttatttttggagaaaaaagtggaaatttggatgtttatgtgaaattgcaatttttaaaagttgattcaaaccttgtaagagtactgtacaagtcaaactacatgcttgttggctgattgtgcactctcttttgctgtggactctaaactagtgtggaagatgggccaactggagctgcagacactttgagagtagctggaaagaacatgtggtcacaccataatgggattgaaggtagggtagagaagttagttctgttgcatgagagggaaaaagaaagagagccagcaaagggttttgagcatgatggaagtggtagtgaaggaagctggtgctggcttcagcatgcaggatggacttcaggctggagcagagggatggggtggggtatagagggcctgggctggggtgttggccttgggagtggaaaggaagggagagctttccaaggaaatcaacaagccctggccagtaataataaaacactacattttttttaaaggattccctttaaagtaagggaatcatgattcagaacatttgaaaaacagatacataaaaaaaaatcacatctgtaatcccaggaccctaaaaaagtmactgtcaacattttgtgtatgttccttcagcctctgttcccatgtctcagtttcttggtgtagttgtagtgataggatatggtcagtctttaaactctttacctgcatcgaacctcatagcttcatctatgtgagtttatttagttaccacagacaccctgggagggaggccacacaggcctggcattctgggaggctacttcagttttccagggtcacatagctggaaagtcacagtgcaaggtccaaaccttctgaccctggagttctttcttttgctccaccctggaccacactgctgctgctataaatgaatgagtggattcatccaacacaaggacaattcatgtccattttatgtaagacatagagggagacaggatgaagaaaaacacatagcccattctctgaaagaacaggaaataaattaaccataatgatacagaatatgaactctagaaatctggtctatgaaaaagatggggatgaatgtaaattctacacaacccacaaagagacaccccaagaggaaatattcaatgagtgttgttattcgcactttctcatgtctttgcacctcagatttataggcctgcaggtccctaagccagcataaattattcctctatggaacttgtggctggattgaatttctggcctttgctgaagttcaccaaacagagaatattaggctctttggccgactgaaatgrgactcagatctaccagctcaatgtgtggctgggaatcttaaggtctgggagtgaaggggcttgcccaagctcatagaggtcagatgccagtaactttttcatttaattccactgcatttgctctccataggaggtcccctggtcttttacaagagaaaactcaaattttctattctgtaagttggaatctctatcacagtggaaacctactttgagttactctgagtcttaagaacatcttctggtggtaggtttagaggaaactctgaagttttagtcaaaactctggaccctatggatttaacaaaatgagcatacaaaagtttacttatgatagtccctgacaaacccctacttttatatataagaaagctagaaggcagagaagctaaatgacttgttcattgctgcatagctcaaacctctgtgggactccaggcttaatgttctttccactccagcagtctagcattaaagaatgaactaattaataaattagtgattataaaagtgcccaagcctgccctcaaagaactaacaacaaagacacaaaagcaccagtatttgagtttagagtaagcattggagccctggtgcccagtagcctggtcctattttttcttccgtaatctcatttctagtctattaatgacttgatccatccaaggaaaacagaactggtaagtttatggctcaaatgaaaggattgtggcatatgaactttgtcattttggttagtgattttattatttgggcaaaatggaaaaccaaaagatatgatgtttagaaaaaaagattattttgaccaaaaactgtttcaggaatgcttgaagctccccctgctctgcctgccctttctctttctcttctgctcctcctcccagggctatacagctggcactgaaagtctttgtcaagagtgcccaaactcctgggctaggtggctcagaaacctttctgggagggatgtcactctgtagctgtctttgggattaaataaaatgacataaaaaaaaagaacttgttccaaagtaggtgcyatgtaaatgctctccacttctttatgaaagactgagaaataaggctaggaaaacgtatgtaacctattcagggtcacagggcaagaattcaggagttgagcaagctagagagtamggaatcataagaactctatgcaaacaacagggtctacgtgtgaaaaacttgatgtcttcagagagaattagactaaatccccgcatcacagtaaacctcaataaaggttagctttctcttgttcttcttccttatttttcttttccattatcaaggccatcattgaaatcattatgattatcatcttcatctctgatgatactgtgttctgccttttctgttaggggtttaagtcactttggatttgctttaatttgccccattcttttcttctgatctttaagcaacaagattcacatgatcaatcatcatgtagtcttagcatgtttctcactccaccaccaaatttaatgcatgaaagtatactattaaagctgctatgggaggcagtgtggaatactgaaacattgagatcatatgactgaaaatggtattgaacgttgagggtcttgggttttagttttggatttcttgctaacccaattgtgtgatgttagattaagtcacttcatggctcagagtctcaggttcctcatctttttaaatgaactaagtacacacacacacacacacacacacacactacacacactgctatatatatttgggggcaggtgaagctggtgagtcttgggcaaggatttttttcccttttatttttttcttgacaggtaatgatacatatttatgggatacagagtgatattcccatacatgtgtaccatgtataatgaccaaatcagggtaattaatatctcatcacctagaacatttatcatttctgtgtattgtgaacattcagaatcctcttttctagctttttgaaaacagaaactaaattattaactatattcaccctagaatgctgtagaaagctacaaattatttctcccatctagctgtaagtttgtgtccgttaaccagcatttccctatccttcccccatcacttaccacctgccacctttcccagcctctaataatcagaattattctctctacttctatgagctcaattttttttagcttcctcatatgtgggagaacatgcaggataaaaaatgtgggctgcttcacgattctgcacatcacccttgcacagaggccatgctaatcttctctgggttgttccaattttagtatatatgctgcccaagggagcacctcatcttcaaaatgttcttagttgttcctactgggatgaggatgagaattgcaaaactctacaaggcttgtgcattttacaattatttgcatcagaagacaacttccatttgcaatctctattcagccagactcagtcaactctgggtcaccctttccattttcctggaatggggtgggagattgggggtaaaacagggcaaggaatgactgactcctgtcactacatagtaccttttttaaaggaacatgaaaagtgctgttgctatttcttattgagaaaaaatatttttacttaaataaaaacaactgaggccttcaacatgccagatagtgtgctgagggaagaatagacagaggagggataagggatatgatgctgtgtctgtcaagcagctcatagtttcacagataaagaagccattgtgtgattctgagcaggtgacttaaattatgtcgcatttcttcctctgtaaataaggatgaaaatggtattccataggatttttggggctcttttgaggcttaaatcattgtctgtaaagtttttacaacagtgcctgacataccacccagtaagtacttaataaatgttattatttttatcatcatgatcatggtctaaatacaatacaatgtggaaagcttgccagctgatctggtggatttggtgagtagcatgtccaacacggggagtttaaagtgtgaggtgggagaaggtttttagggaggaaagacaggtagggcccagagcaggccaatattcatggacctaattgttaagacaaggcaggtgggcgtgtttgagctgtttttttacacagtagtgtaagaggtagagtaagtaaaacatgttttatgttttagaccagtgtttcgcgaatttgcatgtaacatggatccttttaaaaggaaaagcattttcatgtaataccccttccagtgttagcttaaattatctttaaatatttcaaacatgaagctaggtagaaactccttatgtctatggtttttacatgtcttgaaaaccaaaataaattttcaaatacaacataaataaaactatgaaactaatcaatttcagattcacattaattcaataattgatgttgtcttataaccaaatgtccacttgcaaaatgatgtggtagagactgcctgtgttcagcatgcaaatccagccatgtgccatgtgacgactcatgtctctcaccaattttcattttggaatctttagttttacagtttgccttgatgtcatgccacttgacctccaattgtctgtaatgtgtcattgacagactgtcacctctgttattttctcccagcactgagggagatcttctcttattataacgtgacacagcagaaagtccagaacatgtttcaatgaatgttttccttaaagttattattaaaattaaacataaaattaggaaaatattcactgagaactcctgaaccttcatttccaaggacaaccaaggttcttaggtcacggtttgagaaatacttccctagtatgagagtgtggtattgaaggtcaaggtagagcggtagttcacaaagcagtgagagtcctggtgcatgagaatccgacgggaagtcaaaatacaggtcctgggcctcagccctggatattctttttcagtgggtggtgaaggggagttggggagggctcaggaatccaaagttttcctggagacagttggacacagattttaaaaccaccacttgactcaatgatctctaaagtgcaaaaagacctagcaggttcttggtttggactaattattacctttgtttaaaacagatatccatacaaatcagttgcatatttagaaaagctcttttggagaggttcaagttcacaaatacattgaaagcacagattaggcgaaggttaactcaggcaacttaagagcttggctgttcaagcagaaaccctcctcttaaccccagggtcaaacaaatcaaaagcagcaaagaccaccgcaatttggaagacatagctcttctggctcagtttcctcatctgcaagatgacaaaatacaaccttctctaaggtggctgtgaagatgacagatgaagaatgtaaagcaacaaggacataagtgataattaatcagtggcactatttagctcagagctgtaatttctagctaaggaaaccgagactcagggaaatgagccaacgtgtcccaggaacacaatcggcagtggcagaagttggacaatgaccaccatgactcatactgtcacctgttaattcttattgagcatttactcagtgccaggtcccacactsaaaactttgcagtattatctcataacagttttatgagacaggtarctttattttctccattctgtacaagtggaaattgccacttggagaggtcaaagaacttgcccgggtgggtcacaaagtggtggagctgagattcacactcacccaggctaatgctcaaatctcttcttttcaacactctactttcactttccaaaccagtgctcttgtctggagccttccactccagcagcagatctgacccagccttactgggtaatggcagagctcatgagcatcctatgtgggctgaggcatttatcatctgtaattccttgtcagaggtgggcgtgcagtcctgctgatggtttgggatgacagaacccttctctgcacccctgtgtgattttacaggactgtgcccttagggtccaggtgatttcacttctgcgagctttgcatttggtcagcagggctctatctaaggccattaactctccccgtgggggccatygaacacccattagcaatactgcttggtcattatcaaactaaattgaatttaacctcagacactgaggagaaaaaactccatcctggctgattaacaaccgccacagacctccagtgagccagaaaatgagtaaatcaggtgcctcctattcctgtgtctccaagtaaggaaatataggataagtgtgtcacaaatttcaatcaacccaatgtaatcgatcatctctgtcagtccctcctaatagatgaaattcatgtggaccctaagctcgctttccctcttatggcaataaataaataaattcaaaaaaatccacaatcctttagtgaaataattatccacattttgcatatttaataatcataataacaatgccttccaagtgcaaagatttttctctgtatcacagatactgtggcttttttttttttgagtttcagacccactttttgagagatagagggtgttttctttggaagtgagattgcttataatttaaagtttacattttaagccccaggttgagtttgtgagcccatctgtgctgttgagggcctgcagatgagtgactgggtgcttgactatttccgcttggctcttccttccctgtctctagggcactacatatcrtttagctgcctaaacacaatggtgaggccaatgctaatggcatttctgttaaaaacaagaaaacctgtctgagagactctttgagcaaaagccattttatcttacaacactgcgagcagctggcaggtggagggaatgggaaatatcttaccgagtcattcagtggaaagcctctcgtgctctgtggagaaggcctttcttacatgagcaaagcccagagcagtttagaaaaagagagaaaagagtgtcatgtgcttttcaaaagaagacatttatgtggccaacaaacatatgaaaaaaagctcatcatcactggtcattagagaaatgcaaatcaaaaccacaatgagataccatctcacaccagttagaatggcaatcattaaaaagtcaggtaacaacagatgctggagaggatgtggagaaataggaatgcttttacactgttggtggaagtgtaaattaattcaaccattgtggaagacagtgtggtgattcctcaaggatctagaaccagaattaccatttgacccagcaatcccattactgggtatatacccaaaggattataaatcattctactataaagacacatgcacacatatgtttattgcagcactattcacaatagcaaagacttggaaccaacccaaatgcccatcaatgatagactggataaagaaaatgtggcacatatacaccatggaatactatgcagtcataaaaaaggatgagtttatgtcctttgcagggacatggatgaagctggaaaccgtcattcttaacaaactaacacaggaacagaaaaccaaacaccacatgttctcactcataagtgggagttgaacaatgagaacacatgggcacagggaggggaacatcacataccggggcctgtcagtgggtggggggcaaggggagggatagcattaggagaaatacctaatgtggatgacgggttgatgggtgcagcaaaccaccatggcacgtgtatacctatgtaagaaacctgcacgttctgcacatgtatcccagaacttaaaatataattgaaaaaaataaggaaaaaaagaaaagagtgtcatatgtaaataccagccagagatccagaaaacctaaactcctgtggaatttgtttactttttagtatggtataaagctggtataaagaatgggcgaaataacagctttgtgggttgtttttttctaatttattgctctattgacaaaaggtgattcacattttatttactgaggaaacctcactcttttctggggaacactaattttagtactatttctcattgatggagagagaaaagagtactaccaaaaccatctagagaatcttttcaaaatacacatcctcaatttcctttttccctgtgtgcttatcctgagatgtggccttggcctgaagccctaggaagcatattgttatttgctgtatctgggggatgggatttaggaaaacttccctaaggggttttgaaatgcagtccctcaaccactcttaagcatctccttcaggacccactgaatgggagtatggcagagctgttgagtgtgagaaacagaaagcttcctttgacccacacagaaaatagagaattttattggcttacctttcacagttaggtccagcataattttcgttacaaatgcaccgaacagctccatttttcctatagcaggattctgcaaaactaaaattggaagcaaatattggaagtcaattccatacatcaccaaagagactgtcttaactttttatcagattacctctatgttggtcccattaaagttctaatgggtgcaatcattttctttatttaaacttgtacacatttaccttgcaggaaaggttaggctagcaggccccaaaagaaaatgccacttgttggtgggaccatttcccaggtcctatatatatatttcaagcactagtccaaaacatgtatcccaaagctggaaataaaatgatcaaattctacctgcaattttggatttataagagaatccccttttatttccatcactgtctatgtagtcatttaaaagtttcccctttttttctgcactagaacttgtccagttttaaagggaaggaaccagttctaaactatataatctccacagaattataatttctttcatgtgtactttaaatattggaaataaggttgctgagactggctgcgtcgatgaaagtcccagtcaagtactgcagcaaaacataggacccaccataaaaggattttatcccatggaaccctctctctttcttcttcttccttttttaaagataataaaaattaggacacaggacaaaaaagtaataaaaatattggtttagtggaatacataagtctcctcactattaaggcaagggaaatggggttatggtctccacgtgtttggaaaattcttcatagacacatgaattgtgtggggcataggggtgtgtgtgtgtgtgtgtgtgtatgtaaaattttaaggacttttaaattagctttggctttggtactatacaaccaataaagtgtgacccgctgctctcttgttcctttatgtatcagcatttcttaccctaatggtgtttggaggaaagcaaatagatgtgtttatttgtttgaagacacttaaaaaatcagtcagaaaacaatatgtgcttctcagtgaaaggcaacacccacaatttattttcgcaaacagttgggtaaaaacattccaacagaattacatttctttggccttttaccctttattttgcttgttctgatttcttagcctacttaaagaaccactgtcagttaagagtccagaacaggaacccgcgcttccatctttctttgaaggtgttccacccagcagcctgcccacgcttgaagcatgcaacatctgctaggggcatctggagtcatccgcctgtagctggtgtcctgctgtttcaaacagatgacattttccttaactggagcgatttccatagctactggtagagatggaggacgtctggccaacccccaaataaatacatgaacattatgcaaatggtccctgggaacaactgcatgaccactggtctctgtggcgaaggcagactcggtggcagggccagccctcaagggttcgtttttgtttctcatcagcattaactgtttatgttttgtctggttttggctagggaagtgaaaacactgcgtctctctcagcccactgtaaccactgtggtgcccatttcaagtggaagggtgccttttgctcttagaaaatccttaggaacttagagaaaaatagactcggccctttgtttgcttaaycccctgaagcattatttccttgctttcttgtaactggaaatccaaatcctgcgtctgtgggctcagcttcatcaatgtttcaaaatgtaattcagagtctaaactagacgcctttctgaaaagtcctggaactttcattttatagaaagtagcaatatgaatttcttaaaaagctgaaagaggcaatgggcatttgatttttgataagatatttgattagtatttgagattagctaactaagttaataataagtccagatcaaaggttagaactttttaggacccaagaatatttgttctgttccatgaccacagatgaacccctcctctccttttttgcagccagtttccccagcaagggattcaagaagtagagctgttgtcactacagagaaaaatctgtaaaatcccttggtctctcacacccttaccaattcctccctactcctacatgatatttacttataggtgacacactttttacttcattttcgttttcagtaggtttttcaacctcgaatctgtactattagagacttgagttttcgtgtctgtgaatatgcatctagatttagagcacattctctaagtcccttcagtgctcctttgaaccctggatccacttacacagagaaaaaacatgggcagacatggtgccttgatgcctttggaaactgtttcctctttcaggaaaggagactcattccacagttggcaacttttgacttcatttcttaaagagttaacagcattcagaaacgcttcttgctcaactaacataccggatactgtgattcaaaaggtaaagggtcatttgctctaggagtttcaaaacactgctgtattttgacctatcttaataaaggtgagatttttgactgttttactcactgctgtgtcaccagtgactagtgcatgactggcacataataagtactgactaccagtttttataccagtgtataataagtgctcgataaatatctgattgcatgtagacaaggcttctcagtccatagggaatgatgttctaaaggtctcatatcccaagaccaggtaatttagataagaaagtcttgtcatgcaaatggggtgaaaagtgcaaaagtggaacagcataattagaaagaaccatctgagattgcctgcctaattcatctgctactgccaaaaaaaaaaaaacaaacactgcagctcgacgcctataaaccttttctgagcagatgaggctacacaacatgtttatgagagaatgagtgaaaccagctatgaggaagttggaggtaatatatttaacaatatataccatggcaagagaactgtgctaaatatctcaccagacgtgattaaaacgaatgcttgagagcagaatattaatgaacaatgaaaaagtataccaagacrgagtgaagggagctcataaatcaggacatacttgagtgaaaataacagaacagttaatgtttgcgttttctaccctcactgtgagtaccatcccttttgcacatgttattaataytatcatacatgaaaaattacagagcaaggtctgaggcagtttaacagtttctgaagaaggatgggactgaaactcrtctgactactctgactgttagacttgtagtatttgaatacatcacaagctattaggtgaaatgttagttgatattggtgttcaattaaggaaaaaacatcgggggaatctgattgccatctgtctttttcttttctgtttatcagtaagtgtgtgagtatgagtgagtgcgtgtgtgtagtaagcattcagattttaaaaagtcattttatgtgtatcatttaatctttacaacagctatcaattacgtaaatattacatcgaaacacttagaacaatgccaggcatagagtaagaaaaatccaagtgttagaaaaaatatagcggtatgtgttcagtaaaggcaacatctaccttatgcctttccatgtttagggtacaaacccaaatcctccacacatattatcctagtccagtcctcacaactctatgatgcagatccttacttcctagtttgatttactgtactaaggagaaaatctgaaatactgggctggtaaatgaatcaaggagtagagccaagatctgaacccaggcttcttgacttcaaatcccatggaaagtgagatctagggagaaagtaacttttctgagatcacacaggtattatgtgtccaaatttgaatatgaacctagattggctactctttctacttgtggcataataaaaaaaacagtatttagcctttggttcctggcacagactcctgtaattcttggaatttcctgagggaaaagactgtcttttgttattcataacaggcacctttcaaccatatctgagtttatgctaatgaagtgactcacagtggacccctggataccttgagagtgggagcctatgaccagaggcaccaccgaggaaccaaacatgtaattggacgttgtgaatttcaaccctccccacccccaacctccagggaggagaggctggagattgagttcagttaccaatggccaatgatttgaccaatcatacctacaacatgaaactttgataaaaactcctgagcaacaaggcttggggggcttccggttggtgacacgtggaggtgctgagagcatggtgctccagcagagagcctggagtctctgcacgcactccttcttcactcccacttctccatatcctgctctatgcatcacttccatgtagctcttttggagttgtaaccttttaacaaactgacagtcataagcatagcacttttctaaactctgtgagtcatcttaatgaactgtcaaacctgaggagaggttgagggatccttctcaaatttacagtcttctgggaagaagtgtgactagcctggggaccccatttttggctggcatttgtagtgggggcattcttgtggaactgatctcttaatctgtgggatctgcactgactgtggaaacttagtgtcagaactgaattgattgtaggacacccagttggtgtcagagagttggtcatttggaaaaccatatatcactatacctcttaaattccatattctgtcattttaaagagaataaaatggccattgatgacttaattactggatttacacatattccattatttccattaaaatgtatgtctctttcctttaactactcattcaggtcaaaacgtagccagaaagtgttcctgtaaatcttctgtgagctgattggcctaaagcatgcattctgttgatctgtgttctaattctgactgaaaagccatatgtagggaaatgtttcctttgtgaaagtcagaagaggcaatattactgaaaatatgatattataatgagtctgttgggattaccagttgtgattgctctaggtcaagagaaagtcaagaaaagatgagactatccttgcttataaaacttaggagactttattgacctcatgatgcaccccaatatttcgggaacacagtcatcatctatattgtaagtgcttaagcattccaggtggtgtatttggactagaaactttttctatatcttttccagtctcatctcaatatgaggttttgcctgtggagaaacctcagaactctgggataaggcaaaacaaaacaaaacaaaacaaaacaatacatagactgatcattagaagagaccatcctcctttaggacttacttggccaagtggggcaggggacaggggcacggctggcagaattggggtgctcccctgatggaatctccgatataaccatccagacacttttcacagtgctctcctgttgtgttccgctggcagtgctatgagacaaaagacaagaagattgacaaggatgcgaaagaaattttagagacagcacatctaagcatcatgcaatactttttcaagcaaaagggacatcagatcagacagcacagactgtatgcggcagtacrgattagcatgaggagtcacactggccccagtcaatgccagaaaktgtgggtaagtggtgaattaatttttcctgggcttttgtgtgtgtgtgctagtagcctggggactctagagtttgtgtgcagaggagattattcatcagttacttatttcagttcagagtgataatcagaatgatcaaaccctggatgttccagaaatattggcttattgacttcgaatgaatatgaaatgagaaaccaaccaaccaaccaaccaaacaaacaaacatccccctggtacttatccatggcaatgggaacaataaggatttatggtcttggaaggataaaatgtgtcagactgtagtataaatggagtagaaggtagataaagagcattctgctcatgggttggtatcttggatagtgacatagaagaatcagtaaggaggttttttttttgtatgattttcccacttgtagtaaagattataggagtaaaagcacaaagcaggctgacccttctgtctggaatgccattcatcattcaagatcacactaggctgcaaaatctcttgaaagtacatcctaattctccctttcaggatccttccttcttttccactacccatattgtagtgctattatctattctcagcctcatcacccctccccaactctgtgtctttcagcactgtattgccattaactcgaacggagtaggcactcagtaactgtcaaactgatggattaatttctataaggggcagtgagctaacacacaaacagctttcttctatgggactatactagtggtacaaggcaaagccattagctctatttttttcatctttacattcatcagagtgtataaaggttgaattggggttgcagtgaaaaattatactgttagaatgtcattgaagaagcaccctcctatttgagcaattgccttagtcacaccgatgcataagagcttcaacaggacaacttttttaaaacagtggaggagccttgggaaagcaagatggagtagcagtagactgaactctgaggtccttattttggcctttatgctttatttgaggttcagaataaaagaatagcaaggccctgctctaaacattttgtatggattaactgacttaattctcacaacaatcctgaagtaggttcctatttcccctgccaccctcacccctgccattttacatctgaagagatggaggtgcagaaagattaagcaaattgcccgaggtcacacggatagtaggtgtcaaaagtgagattcaaattcaggaaatctggctccagaagtgaacttgttagtttccatattatactgcttctccagtaatgttgaagaaaaggcttaacaaacagtartaaaatgaatgcattagaaggcatcagtgttactaacactttgagcttcaattgaaatataatattaatacattagtcaaaggggaagaatcttaataagggcaactagctatcccggttgaatgttcttcaggcatttgatcagccattaggtatgagcaatctttagtccctgattaaaattatgtctgcaaagtagaatttaggggctagttcagattgcctgacagatcaatgagaaactctgaaaaataaagtatgatatgcagacaacaggatgttaacatatttcccttacagttcttaatactgtgtcttgtgctaagtcagtctttggaaatatttattggggaaaaatgaaggaaaagggaaaagcatggattaatgaatttgtgtctggagcaaataaaggaaattaacatgaacccaaagctaatacaaagttgcagcaatctctcatcccaggaaaaaccaatgagccttacccaactaccatgaaactaagccataaacaatctggcagggctgcttgtaggctggggttaaatttgtctgagttcttgctggacggatgaagcccctctctgcagaagaaaacaggcccattgtaagatgttaggccattctttgtgcccaaagtgactactgtgttgcaaaaatgagctaattcccaattctgtccccttatggctcgatagatgctttagattccttgtcagggctttaattctgccatggcagccatgggaagcagtgaccctcaaaagcaaagccaccaaatttcttttgccctctaactgctcagaatgcaagtatgaactttcctcatctgccttctttcaaaaggtttattatgaaactccctaaaaggcttcaatgcacattctgggagattggcagacagagtgctggaggcagggagaaaaggtccctagctcttccactttctagctggtcaactttgaacaagtctcttgaccttcctggttttctattcccttatctgcaaagtgatgatttagactagatggsctttcaggtttcttctagctctgataattttttactttgagattgcaaaatgtcttctgttttaccttcagtgctctggcatttaaaaaacagaaaacaaatatgacaacaataaaaaaggtatgttgttgtgaggtgaatggtttggctctgggttcccatccaaatctcatattgaattttaatccccagtgttggaggtggggcctggtgggaggcgattggatcatgagggttgtttctaatggcttagcgtgattcccctagtgctgtcttgtaatagagttctgagatctggttgtttgaaagtgtgtagcacctccccctttgtgctctccctctctctctctctctcccccacctcccactgcaggccatgtgaagatgtgcctgcttcccctttgtcttccatcatgattgtaagtttcctgaggcctcctcagaagcagaagcctgtacagcccacagaagagtgagccaattatgcctcttttctttataaattacccattctcaggtacgtcttttttttttttttaatcaaaagagtaaagtgaaagcaagtttattggcaaagcataggaataaagaatggccactccatagacacagcagttaggtatgactttatagcagtgttagaatggattaatacaggaggaaaagttcattttttaataaaactgactccacttaaaaatgaaattagcattctgaacttttagccagtggttaagaaagctatatctagataatcgattgcagataagtgttgggaytgccatttggacaccaactgtgtctccccaacatgagaaatgatatctctcatgtgcttggtcacaggaccagaataatgtaggaagaaggctcaaaagaatctggttagccttcctgtgtttgtcagtgtgctttatgcaagactagatccatggatctctaagtatgcccagggaggtcaaaactgtttctaaataatactaagatgtttcttatattttgcattctcattttctcatatgtgtaaggtgaaattgtgtagaggctacacaacacaagatatcacacagattgatgcagaagcagatggcagaatccatcttcttctattaagccagatattaaacatattttcaagttgtaaaatatgtttgtttgataaaaacatattgtcttaacatggaattggtatattattgctattttcaaatgaatttataaggattagaaaatttttcagtttaaatttcaaatgccgtaaatattggtatatatagtccacattaaaaaaagctctctggtatctttaataatccttaacagtgtaaaggtttatgagatcataaggtctgcaaactgctctctgtgtagatcaatacttagccaacttcaatgtgcacgtgaatcccctggagatctggtgaaaatgcagattatgagtcaggatgtctgcatcctgagggtctgcatttctaacaagctcccaaatatcatccatgcagctggtctggattacactctgacaagcaagggtctaaataaaaatacctaatattggcagcactgtttgctagttacatacagggttgggcctgagcctcagtttctagcataagacagtacatcttaaagaagtgacccaagtatctcataacagtaccataaagaagtgacccaagtatctcataaattacaaaattaaagatttttgcatttagggtagcttgttattttagtaacctattcattcattcacttaacaaacctgaattaagcagatataatagacaatgagccatatctgttattaaaatgaagaagacctggttcctgcctttgagtaactcacagacttgtgaagaaaagagacaggtcaacaaagaacaatacagtgtgtgaaggctatgtctgaggtatgcagaaagtacatacctgttatgggacaaagatgagggaaaggcagcttttagctcttcctgagaaagttggagaaggcttaatggaggtggtgacatttgaactaagccttaaagttgtctttcaagaaatctcaggtagaaaacaggggaacaagttcaggcacaagagagtgaaagaacaaagtatgtttaggtggcagtgtgctcagtgtggctggaggagaaactcctggaggattttggaaagtgggatgccttgattgggttgtgtttttgaaagacgtctccattgctgtgtgggagacagagtagaggaaggagagtctggagcaggggatggatgatgagttgttgggaagctgtgtcagtggtcagggaggttgtggctgtgaattaaggcagtgggaagggatagaagagagctctctcctagtttgaattggtaggatatgatgtgaaactgatggttggggaggtaaaaaaggaggtcgatggagcatgggggaccagcagagtaatgctgtcaccaactcaggtgaggagtatatggggaggaccaagttcaggttgggagagaaaggatgaacaatgtatagataactcattacttgcattcagtttctgtcatttttttttttttttttaacagagtcttgctctgttgcccaggctagaatgcggtggtgtgatcttggcttactgcaacctccacttcctgggttcaagtgattctcatgcctcagcttcccaagtagctgggattacaggcgcccgccacaatacctggttaatttttgtatttttagtagagatggggttttgccctgttggccaggatggtctcgaacacctgacctcaggtgatcctcccacctcggcctcccaaagtgctgggattattggcttgagccaccgtgcccggccagtttctgtcatattcttatgttgatgggcacacagcaacaggggactccattgagctgtccaaccttagaatcctttggacacgaaactttctgactttctttcagaacttcagttatcatggaaccaaactgatgatgctttccaaaatttcaaatttttccaggtttgcaacagatggaaaaattgtcaaagttttcatgaaaggattatgcacttgatctagataccaatttacagttgcaagaaaaacaggaacaagaagtctctataatcagtttcttcctgttcttcgacacctgatgaatatgctggtttattgatcacacatccttagtcttacagggacttatatggttgatttctgccttacacagtaataaaatagagttcaaaaatcatgaaaatgctagtgtctgcagaaactgagatgtaatacctttgttttcctgaatagggttttaattaagctctgagactaataagaaacaaattagccttcaatatattggattgcttcccttctcattgtgcctagggtaggctggaagttcatctgggtgaattaaattaatggacaaattaatgcttaatcaaaaggaaaatgaggagccctgtgcctgtggtgaacttcaggtcaggtttgtcccattctagttctggtcattgggctcctggctttctcctaatgacaaagcacccattctttagatggtaactaaccttagttagagctccttctgggttctatgtacttaagcctctagggctgggatgaaatatggattatctgtgaccaggcatttctgccaccagccacctatctgcttccacttgttttttcccctcaatttttatcttgtgcctccttctagtacctttatagagagccagccatatccaccagagttgcctgcctttggggccccaccgagctgactcagctgagaatcctgtccaatgtgttccagttctcataagatgcaaagtggcccattggaaagacactcaaaacatagtagatttctaagctgttttattttcatttagccactattctatatttgaaagattagtgttccaccagtaaaaaaaaatctctttgcttgcttgatatgtgtaaaatggtagcataattttgtatactctatattttgtggctgaatggcttaggtcagctttaccaacagcttagttaaaatcagtctgtaaattttaatttcaaattgacattggacactggaattgaggaagaattagaagcagttgaaggtgaacaaggcagatacagaggtcttatatgccttcaagataaaagcaaaataagacaaaatgaaataaaagaaagccttttatttttggttgcttacaggaaatgagagaaatgaggtaagtcaggcaacctgcaagaactgactgaaacactggtcatgacagtgagctacaagaagtgttcatgttggagccctggcttctctggctccctgagagctgagaatgaacgatagggcagaagctgaaaaacctgggtcttctccgtcagtagtctgggatagcggcaccaaaggaaacagaaaaaaatgagtttgattccagtgtgacaccacagacttaacatatttgcaactaagtgaaataaaaaattctttttatattcatgtgcaagcattttctgccccttcacttacatttaattaaatataaatatatcttttttctttttttcttttgtttgtttattgtacagatgggatctcattatgttgcccaggctggtcttgaactcctaaactcaagtgatcctcctgccttggcctcccaaagtgctgggattacaggtgtgagccaccatccctagccactatatcttctttctttctaaattaaatttataagaatatatctatatgtgtcgctctgggggataggaatgtgggtgatttttactttgtacttcaagccatttataattaaaataatctgtttaataggaaaattatactaatgtatctatatttttggtctgttttcttacactgaacatatattacattaatgagggaaaaaagatatttttctccggacaggatgaggtggagaaaccatcattaagatgaataaaatggctatttctttttgtattcattttctgcgttggaacaaagtagttggaggaatgttggcagcttcactgagtgcacatgtaaatgtgtatatgctagcccatccctaaacatttattagaacctgttatgtcacaggaccttggagggaatcacatgatgtttgttcctctcaccactaggtcagagataaagccatgattgctcccattctgacaatgtcattgtaaaaagagtggcttagtcatttctttcaatagactctagcaggagggacttcttccctctttaatttatctcagtcttgcataatattgactgcctaacagcagctgatgtgcttgacagtctccactgctttatattttaataaatcagataacaaacaacctttaattggtcaaattatcagagatgtacgttattagttcaagtgtatccatgggatttttccccccaaatgtcactgggattaaaataacaggaaaccggagatggaagcattagaaaggagtagactttggcagctgcagaagcctacactgtgacagaggacatcctggttgtaatgcttatttaagaagatgggggaagggaaaacaaatatcaggactaaataaacactacaaagagatagcaacattagtattttgtcacttaattctctgtccctagaaaaatggcaacttctagggttaaagatcaataaaaacatttgcatttgcatcttaatgtgtgaataaaatatcactttcatgtacacacctaagaggccatttaaaataaaaattatctaatagggacaattatgcaaatgttgagtgcatttaaataagtattcttatagtttatgcaaaaatactcttgtagttttggaaaacctctttttgccagatgggaacttgaagaatttttctgctgtatcacacagctcacgaaggaaaacatgctatttgagcataagttcttataaatgccctctatgacttccactgaagccacttctggtaaatatttcaacacccattttcacttaagttgtcagtccattcattaaaaatgggaaatatgtagcaagtacttttctgctggaagacttctcaatctttcgcacaaggctctatcatgcttcaatgaagaacrgtctattggagaattcatttcagttaaggaaaaaaatagtctcctgggggcttaaacacagacttgcaaagaccacaagggcaaagctttcattttcatcagctattgggttcaaacttaaatttcttttttaaaaactaattttgatctatagacctggttattttaggttctaaaataggctaggcaacaactgtttcattctcctggtttatgtggaacgaagccaaacatatggcaaactatacgattacagaggaatttggatgtatgggttcctcctctatgtatcattttcaatcccaccgccattggtctacagcaggcaaccagctgctgagggtggtggggcaggagcctccgggtgcacgtgcacactcatgcatatgccttggtggacccttaaaatcagaagtagtttatatgagttgtttcacaggaaaagctgaagggtgaacaaaagcacttgattagcagtttgctcctatgtggctcaaacatccgaaraatattttatcttcacccaagatgcaaatgcccagtgaagtacgtgaagtgttataggtgccccaacttaccacacagtatcctgagccgtccaaacactcgttggaattgccattacagtcgcagggcacacattctcccgacagggtgtgaaagaatccagcattgcatttctgcaacagacacaccaaaccattttgattattgaaaagattgattttggtcaatattttctgagaagaaatcagagaaagtgattattaaacaatctaaacatttctaaaatgaatatactaaatgatacatacaaaacatactaaaataaactatttatactaccattcagtgatagatgatgtatatataatcttctttgttacataactttttccctcctttcacttttcaggagaacagaaatgcctttaacactgtcttatcattgcaaggaagaataagaaggtattacgtaacagtaagggagaaaaaaatgctaatgttttcttccagtataagcaaaacaaaacaagaccacaattaagtattagtcagggtgaggtcatgctccctataaataaagaaagacttctcgtttcagcaatcactagctataggagagcaacttagctataggatagcaactgagtctttcatgaacttcagttcttaaaagcatctgtttcttcagatgctaacatgttaaagggagggataaggaagttaatgagttcttacacttgtcaagtcctgtgtgggtgctgttcatatatgtatttcatttgtcttcagaatgctgcgaggaacacatgactttcccttatcctagtgatgagctcatgagattgagaggtgctaagtggcttttggggatgttaaactatcctgtcatgcaccaattgacctgcacaatcatcagctgccctccccagatatcattagtgtgccatttgagacacattatgagattrttcctggtttatgtgattaggctgtggatatgcatttgatatttctttggaatgtctcagtgatgaagggcagaaatggcattatgggcctggaaatccgctccccgcccatcagacaagtttatgtctaaagaattccagacagataagaatctgctttgtttccacagacttacagagtccaagatttcacatcatacacccccattgacccattgtagtttgcacttccctggcgaccaggaaattttcattatatctggctgaagtccctctgattgctatgcaaacctatttccccttgctttttactctgtaaagaaagagtcactaaacaccattcacagtatttaaaaaaaaacacacacatcagttcacactttaaaactaaaatttaataaaccccatttggaggaagtttaataaagaataacaacatttgtctatgaaaaaaaggcaaggaaattccacatttccaagttagagaaataaggctaagagaagatcaatttataattttttaatggagagttgtggttgatggtaagcttcttagtttccactagaaaacaagagagggaagrcactaagattgcagtaggaagcatttaatttagaccatttaatttcacatttttagtctttgccgcaaagtaaaacatacatgttttcattgtgatgcagtacacagattggtatctatatctatattggtgtagatatggagatagatatagatatccatatatatgtgtctcagagaaaagattcacaaagtaataatgtacctaaaacttctctattgtatttaagagtatatcctggtcatgacccataaaattgatctgatgacccatgaatgtgttgcagttttgcatgactgcagggttttctttataagagtagtgggtaagagtagtgacggtcttaatattagttatcttagtagcctcttaaatggtggtttctgagctctctaaatgaccatattacagtcttctggggagcttctgattcagtgaaaccaaaggatctgcattttaaaaaataacttttgtgttttagaataactttagatttacagaaaaattgtgaaggatctgcatttttaaaaagctccccaaagactctgatatttggccaggtttggaagcatctctcacaatgccttgtatatattaattgctcaatgaactcttggtgatttgggtggtttggacaaggacagcaaactggagacatatatactattgggagcccacagaatatactgataatccatccactgctctctcctaagggtggatttcatctcaactctttgtcaacagtccagcagccagtgcctaggttggacagcatgcaagatgaaatctttgtgatgtgccaagtttaggaggagagttcactgtgagagcctgtcattatccacttaccactccccaatctgagattatgaccttgggtgaaggataacttggctctgatctcttataatgtgggagatgggaagaaaagggaggtacgaacagggctgtgttgagtcatttggccccccgccgagagggcgaggagggctggcagggaaacctggcacactacgttcctgctgggccttgtccacctgaaagaattatatttttcagtcatctatctgggggccctgggcatgccctgctagagcacatgtcctgggtagcttgcgtctggtgttgtggaactttggaggactccctggaatggagtttttaagtggttcaagagaagtttgagtgtactgaaggatgagctgttaaagattgtttcctttaggtggaaatatttcatcatggctccagtgagtcctgttatttatttatttttactgaatctttctttgaaatttcgaaggacctggcaaaattggcctttttgtaatatcaaaaggccgatatttccaagtatgaaagtagaacgatgtatttttagttttgctcctggttaatgtaatcgttatccttagtaattctaacacctgtgctatttagaggcctgtgaaagctgaatggattctccaaaaattagtgtctattttcttttggaagagtctccacagtttactaaacaaagatggtgtttgtgaatgtctatgtatgagagagtaagagaggaagccttccaatcaattttttgataccacactgaatcctcttttccacatgagaagcctgtcctatactagacaactgtaaaaacacaatcttagcattcagaggatctgtaccttctggggtgccatggcctttttaaaaattgatagtaataacaaggataatgatgatgataattataatatagtggccagcaatgtcatacaactccaagagttcagactgatccaaatcttgttctttctttgctataacttgctgcccctcataaataaatacatacctaaagtttatttaattgaacatgaatatctaccatgtttaagtcactgtgtcagttatgttgcacaattctctcacttgacaccacagtagccctatgaggtaggttcccttgtctttgttttactggtgaggactttgtgacttacagagatgtattactgaagccggctaatacagataagaaatggtggacccaggatttagatccttcattttttccctcaagttttagctcttaaccatcttgcgtgccattaatatattgaaccaaacatttcttgttggacatttaggttatttccaaatttktgctgctattaacatttcaaagcaggctgaaatggataaaaaatgtaaaatgcctcctttaaatcccagaaaaaaatctttgctaatagacacaatacttaaaaatacatagttattaatatatgaaaaccattgaatgggatattgacttttaaaaatatttattttagccaaattttctctttgaccaattaccttccactaagttacttgtagatcttttacagctctttattattaagagactcctattatcacagcttgcctcctgctctaccattaagactgaattaatccataccatttacttctgcctttgaaaaataagagtgaaaattcccatttgcttactttgttatatttagtatgaggtctggcttsgagtaaaatcattgtatgtgtacttgcctaattttacatttatggaaatgagaactagatgtaactttatgaggaaatgagtgtggtgtatctacatgtgtcaattacatttaaaggaactgggatgacaggacatgttgttatcactgcagaaggaattatttccagaggtttatcata

SEQ ID NO: 3 - DNA, 90400 bp, Homo sapiens
gagtagctgggattacaggtgtgtgtcaccacgcccagctaatttttttgtatatttagtagagatgaggtttcactatgttggccaggctggtctcgaactcctgacctcaggtaatccgccagcctcggactcccaaagtgttgagattacaggcatgagccactgcacccggccgggaaaatkgtttctaaattcagaagagcttatttaacttattttacagttatattttcaatccagtatcaaaccttaacagtattagatattaatacatcagaagttgctctcagatttaccagattatttgataatttttctaccatttgattgctttacttttaacacgagcagtaggttttctttttttttcgtatatacctacagagagcattagattttctgttgtgccacctgaatcttactgtatgcaaaagtaagttgaactactttaaggatgacaacatgcctttggctattaccttgttgtcacaaattttaccggaaaaatacagaagcacctagatgtctcaccaagatgtataatgtatgttcaaaagcagaccctagtttttttttccatcaaaaagagatctgaagagcctcagtcagagaaacaacggtttcataaatacaaacctaagctacaagttgtctagagtaataaaagaaaaatctttctctgcccccaaatctggtaactattaatacttcagcaataccagtagttaataaaaacatctattttacatttgtaaaaaaaaagggaaagtattagcaagaaactgcattatcaagaaggcttagtaaagctgcattttttaaaagtcatctgatttattaggggagttattctctcgcagtcatttatttgcagaagatattacagatttccagcggaaagagaaagtgctgaaatgggtgtgttctcaagtagccatttggaggatgaaagaacagttgagtatattggaccttgggtaccaaaagtgggccaactggatcttgcctgataagcatttcaggaggaacttggggtcttcatagcataactttgggcttcttgaaacagttgaagtgatcccagatcatgctttgaaaagaaaaatttggtaaagtaagtaaatgaataggtgttttatttccaggttgagccccatgatatgtaattgatagggggtggggaatgtttaaagaggcttagagcaaagcattttgcaaggaaaggtcaggttgctgcatttgaatagctttcatgtctgatgtctgagaacttgccccagctagctctactctcttctcagggacttagaagaattttctgcactagcktctcctgctcagttgcctgctacaggaatgccaggagaactgtagagatggacttacatgtaaatgctttgggctgttctaatagaaagggcttagaacaaagtcaaagtgaaaaaagaatcaaagcagctttgagacagaaaaaaaatggcactgaaaaattaaaattacctgaagcatttttgaagaagacaaagcaacttcaaacactgttttaagataggcggaatcccatgaaattttattgaaataaattaaaatttttcttttaaaatattcttataaaccaatggttaaacaccaatttgcataaaatattatggacttgatgctgtactaggagggttagatatctgccatgttctttacatggttgcaaacagtgtggagaaagagaaacacaatgttgatacggatgcataaacgagcttgttcaggcaaaggccttgcgggtgaaaaatgaggtaattaattatggaagacatccataaccatgtttttgtcaaggaagtaagttttgggaggatatatttttggaaacagagatacggagagagagcyacagatctttacctatttggggtaggcagagaaggaccaaggagggcattcttgttttattagacttagtttggtttaaacttttttttttttgagacggagtctggccctgtcacccaggctggagtacagtggcacgatcatggctcactgcaacctccgcctcctgggttcaagcaattctcctgcctcagcctcccaggtagctggcgcgtgccaccacgcctggctaattttttgtagttttagtagagacagggttttgtcatgttagccaggttggtctcgatctcctgaccttgtgatccaccagccttggcctcccaaagtgctgggattacaagcatgagccaccgcacccagccctagcttaaacttttaattgaaataaaatatatagaaaatggaacagatcatgagtatacagcttaatacgcacacctgtgtaaccagcactgagattaaaaaatgggacatttctggttccccagaagtcccctccttgtctgtggtctagatttgatttataccggatctaaaatagcatttgtttccaaatatatttaagacattgccaggggaaaaacaacaactaatgtggggtgattttgtcagttggggtcacacagctttcaaaaaccaactcaagtcattttccattctttttctccttcaaagctgtcaattccatgccagtggataacaggaaccacaatgaaggaatggtaagttgcaatgtcaatcttagaatctagacttgtgtctagactctagattctcccagtccctattataccaaaccaaacacacgcatgacataatcttacaaagccaggttttcattgctgacagaatgtgagcaagggatgcccctcctgcactgagctcctatstcctgtcaggatggtttagcacccctgaggatagctgtgccattggttcagaaatgggtgtttatttcccttctccagataatcccaactcagtgccttcttgcattattctgtgtagaagtttggaagatttcattctgttcctgtaaatctgtatctccgccctaagaatactrcatcagcccaggtcacgtaatcaagtcttccttgacagcagctctgggttgagtagtctgtcatccagtgataccagcttctccaacctgctttcgggtttccccccaggtgactcgctgcatcattgaggtcctctcaaatgccttgtcgaagtccagcgctccacccatcacccctgagtgccgccaagtcctgaagacgagtaagtgtcccacacggcaggcagatcttggtcactgcagtgatccttgttcctactccctccacatcaccttctactttatctacaaatgacctgggggcataatgcactaggaagagtattgattgactaggccagtatctgggagacagaagatatgactcctagttcctgctttaccacttcgcagctgtgtgactataggaaagacmgtttgcctctcttttcctcaaagtaaaatgaaggagttgaactcagtgatagtctttcagatgtctatccgttcttaaattccttagttccatactttggatttttagaaccggacttcctttgggtggagggggtttgggaaatgctggtttgtgattagatgaggaggggggttatggaagtgttggacaatgacagagggagatttaaaaatcattcttctctttgccttttgctcttctgacagtgagaatcaggaagctgagaagcaagaaacttagaaaggtgacttaaaattctggcctatttacacaacaaattagctaagatattttaatgtatagcttactagaatagaaggtgccaccaaatggtaccaggagttccaggcctgagaactggaagggtttcaggtagaggcagtgcattccagtgaggcagactaatggctttctgagtccagcctgtgaagtgttctcaatatgaaaccatttctgctgaaaataaaatttgaacagtaatataagcagtacccattggaaattgacattatgaggtcaattttacaaaactatgcagtctctgttatgcatgaagccacactgattcaaacaaatccagaaaacactgccctcttcaacactgtcctctgcttttaaacttttagtcaggctgggaacagtagattttatcttattttttcacctttaaaaatctttcaggtgggcatagtggctcacacctgtaatcccagcactttgggaggccgaggcaggtggatcacctgaggtcagcagtttgagaccagcctggccaacatggtgaaaccctgtctctactaaaaatacaaaaaaaaaaaaaaaaaattagccaggcatggtggcaggcacctgtaatcccactactcaggaggccgagacaggagaattgcttgaacttgggaggcagagactgcagtgagccaagattgaactccattgaactccagcctgggcaacaagagtaagactccatctaaaaaaaaaaaaaaaaaaaaaaactctcattgccaccagcctggccaatatggtgaaaccccatctctactaaaaatacaacaactagttgggtgtggtggcgggcgcctgtaatcccagctacttgggaggctgaggcaggagaatcgctagaacctgggaagcagaggttgcagtgaactgagatcgtggcattccactccagcctggatacagcctgggtggcagagtgaggctccatcaaaaacaaaaacaaaaacaaaaaaaacaccaaataaacacctctcgctgccagacaagactctcttgctatagctatacatgagccctcatgcatgaaatggtaaaaagcaaatagtgattggccaaaagagtaacctgaggccaggcgcagtggctcacacctgtaatcccagcactttgggaggctgaggcgggcggatcacaaggtcaggagatcaagaccatcctgtctaacacagtgaaaccccatctctactaaaaatacaaaaaattagccgggcgtggtgacacacgcctgtagtcccagctactcaggaggctgaggcaggagaatcgcttgagcccaggaggtggaggttgcagtaagccgagattgccccacggcattccagcctcagtgacagagcgagtctctgtctaaaaaaaaaaaaaaaaaaaaaaaaaaaaaaaaaaagagcaacctgaattaattcaatctttgggggcttcaggtaacaatggtagctgtgggggcctgagcctttagggaccctagaaacagtggatggaagctttcctaccactcccagcccacatacctctttctgagtttctttccaacttcttttttccagcagttacaggaagtgagtaagagcagagtgggtcactaggcagagagtaaaggctgctccttttggcaaacccatcttggtatctccctttccctttctttgtttactagaccaatgcaaaagtgaggggcctgtcccatcagctcactaaagaaccacagttgcttaggaaaagttgcctatgcctgcctgccaagatcttagcccttagattatggcatagtaactctagcctctgctccagccctgattatgccctgaggtcttttgrtgtctgttgagagagacgtagggaaactgggaaaaatcaaatgtatctaaggatcctggagatgttatacccagagagtgacagaatgctgagatggcraaggtttaagagctcttctgtggttgagccttaaacaccaggcagagctagacagacaaataacacaaaagagtaaggcaggacaggaagtgactcacagactggagggcacatgccttttctgagagggagcaggtaattctcagctctaaacccgttatggagaaatacagactatgttgtcaaatcttgggatttttcaaaagaagttaaaattttgatttttaaaagacatctcctggtattttcatatcgcctctgaattcaratgtactaaaactgctgtttaggtcaaacagaatttacctctgatgcaccagtttgcaacttttatcctattctagttctctctctcttgttggcatgtcgtaaactgatcagaagactggtggagcttttgcccaactggttggatgaatgcctttatacagcctctgttccaccccacgcccatctccactcccactcctacttgcatgtctcagagtcagcatatactcactgagcaaatgagtatttggggagtaggacagaatcattgttttatggatttgagagacctcagggaagacgtagtctaatttcttcacaggtacaagaatctctttgactagggttgatctggtcatccttacagcatgacagatgcatttccctgttttcgcttgaaagtaagtgtgagcttcacagcttgattttacagcttgacagtgagtgtgtgctgctatcacagcctcttccaggcccacctgcggggcttaaagctaaatttagtaggaagagctaagcctcaggcacatgctgctcaggcagtacatatttaattgggaaaaaataaaaatacttctgttcctgacacttaagactcacaaaccagtaggcagtaggaaagggaccacagtgactcggcccctggaggctgagatcttgtctgatcagctctatttcaaccaactctcagaatgacatcagtatctgtctgtcttagtcagcttgggctgctatatcaaataccatagattggatggcttaaacaactaacatttatttttcacagttacagcagtcggaagtccaagatcagagtgtcttatgagggcccacttcctggcttgtagatggctgccttctgtcactgtatcctcatctggtggagacagaaatcatctctttctcatatctcctttcttagggcactaatcccattgtaagtgctctaccttgatgacctaattacctctcagaggcccccacctccacgtgctatcacattgaggattagggcttcaacattttggaatcacacaaacatttagtcaatagcactgcccagagccaccatgcttccctgtgcccatctggctagccatgccccaatgctatacacaccaccactggcttttaagaggcaaagagactggtgacagatgggccttctctcagatgtctggaaaaggccagggacattttcattgcctcataaacatgagaatattattatcatgccagactggactttaaacagagaggtacagagagtccactatttcttggacatttttacaaaataaataatttttttccattttgcaaatatcatttcaaaataacttatcagtgccacccaatagaaatataatgtgagccacaaatataatttcaaattttatagtaaccacatttaaaaagtaaaaagagacaggtggaaattaatttcaataatatattttatttttatccaatttttttctgatatataattttataaatctgatctatttgaaatatatattatccaatacatccaaaatattatttcaacatataatgatataaaaattgttgagattattttacattattctttattctcagaagtctgatgtgtatcttacatatatagcatgtcycagatcggaccagccacatttcaagtgctcaacagcacttgggcttatggtgcctgcagtgtagacccagagctgtcagtggccttggcttcaggcattttatctgaactctgtgacataggttgaaatccaagccctcccagctaacaactgagacaatgctaactgcctatctcctttcatggggtgcccttgagttaaggaggacttagtaaaggagctattgatatttggaaaagatggacgagaacagcattcaattaaaatatcagttataccatgtactctgactctggaaacacaaagataactcactgtgctgaagtctgtccccaacatctgagaacatgttgggtggatggaacctgagtgaagaaagaaatggccctttccactgatgtgcagttttctcaggcaagaaatgtacacccttatcaccagctactaagttatatatcacatactgctaggttgagcctacagttgattggataataaaagtctgatataaactaataatttcaaatgtttaaatcctcctttgaatcttgatatttcttattttggctagttaactatctagctggattattgttagagccattcacatagtgctaactttttaactcctacttgaagaaaatatggaaagaatggtcttggattataccatgctgagtctcaatgtctgcaaaaagaagaggttggactggattagatgaattctaagatgtttyctgcctctaaattctaatatttcataaatctatatctcgatttcagtttgatcattggtagtaccaatgagagaagctggctgggcattatgaagacataaaaatatagacagtttattaccagatttaaacacagtcaaggagctttcatagcatttactttcaaaaggaatctgagtatattcttcattaacttaaataattatccaagcaattttcagtgtcatcaggatttgtagtgattactgaggctggtgcttgtggaaccacaagcaattctgaaattatacctactcttcattttcattataggtagaaaagacgtcaaagacaaagagacaactgaaaatgaaaacacaaagtttgaagtaagattgttaagagacccagctgatgcctcggaagcccacgagtcctccagcaggggagaggcaggagccccaggggaggaggacatccaaggcccaacaaaggcagacacagagaaatgggcagagggaggcgggcacagccgagagcgagcggatgagccccagtggagcctctatccctccgacagccaagtctctgaagaagtgaagacacgccattctgagaagagccagagagaggatgaggaggaggaggagggagagaactatcaaaaaggggagcraggggaagatagcagtgaagagaaacaccttgaagagccaggagagacacaaaacgcttttctcmatgaaagaaagcaggcttcagctataaaaaaagaggagttagtggccagatcggaaacacatgctgccgggcattctcaggagaagacacatagccgagagaagagtagccaggagagtggagaggagrcagggagccaggagaatcacccccaggagtctaaaggccaaccccgaagccaggaagaatctgaggaaggtgaggaagatgccacctctgaggtggacaaacgacgcacgaggcccagacaccaccacgggaggagcaggcccgacaggtcctctcaaggagggagtcttccctctgaggaaaagggacacccccaggaggaatctgaggagtcaaacgtcagcatggccagtttaggggaaaagagggaccaccattcaacccactacagggcttcagaggaagaacctgaatatggagaagaaataaagggttatccaggcgtccaggsccctgaggacctggagtgggagcgctataggggcagaggaagtgargaatacagggctccaagacctcagagtgaggagagttgggatgaggaggacaagagaaactaccccagcttagagcttgataagatggcacatggatatggtgaagaaagtgaggaagagaggggccttgagcygggaaagggacrccatcacagaggcaggggaggggagccacgtgcctatttcatgtctgacaccagagaagagaaaaggttcttgggtgaaggacaccaccgtgtccaagaaaaccagatggacaaggcaaggaggcatccacaaggtgcgtggaaagagctggacagaaattatctcaactacggtgaggaaggagccccagggaagtggcagcagcagggagacctgcaggacactaaagaaaacagggaggaagctaggtttcaagataaacaatatagctcccatcacacagctgaaaagaggaagagattaggggaactgttcaacccatactacgaccctctccagtggaagagcagccattttgaaagaagagacaacatgaatgacaattttctcgagggtgaggaggaaaatgagctgaccttgaacgagaagaatttcttcccagaatacaactatgactggtgggagaaaaagcccttctctgaggatgtgaactgggggtatgagaagagaaacctcgccagggtccccaagctggacctgaaaaggcaatatgacagggtggcccaactggaccagctccttcactacaggaagaagtcagctgagtttccagacttctatgattctgaggagccggtgagcacccaccaggaggcagaaaatgaaaaggacagggctgaccagacagtcctgacagaggacgaggtatggtctagggcttctgtttaaaagtacttactctggtcaatgttagcacattatgttcaagactatccgatattcacggggagaaattggtgggaattaatcactatgaaaatggtgctctagtaatggagtggaggccaccttgggggtcggtttccacctacctctagccatcgtccacatccttgtccacctcactcggttgcattgcttctcaaccttgtctgcacactggggtcacctggagagcgtgaaaaattactgtgttagagattctgtctacttagttcctagggtgctgcctgatcatcagaatattttaaagcttccagatgattgcagcgttcagccaacgttaacaactgctgttctggtatcttccccttggtcctcttattgttcatcactctctccctgaggcagggagaataggtgatagagaagtttacttgcttgcctatttagtttgctatctttattatttcatgccctactgccatcagaaatttgtatctgggagaggtaacactactggagctgaacctacccaaacaatgttttttttcctaatattgattatgtaggttggtgcttctcaaagttgaatgtacattaggatcatgagggattcctagcccccagagttcctcatttagtaggtcccaagtgagaccccaatatctgcatttctgacaagttcctggctgatgccactggtcaggkgaccacactttgagagttactgaggtaggttgactaatgcagcttctaacatgcctaaaattcccctttgcactcatrctccatcaaactacagcaaaagaaattggttcgggacctcatgcctccacttttctgtattttccagaaaaaagaactcgaaaacttggctgcaatggatttggaactacagaagatagctgagaaattcagccaaaggggctgactgtcattggagcggtgggcactgttaagaagcagccatcacatgatctgtttttcaccacttcactgaaagacaccatttatmtacccaagggcagaaagtagaacttactattcattaaatgtttgacacaattggaattgtctttaatttctgtcagaatgctattgaaaatgtgaattgcatgacttgtagcatattcttttctgcaaaatagacatattaacatgcttatgacaatgactgtgctactgtctttggaaaaatgtttgtctcagttggaaataataaaagattcacctgagaccaaaagcttcattgttctcagcttcttttgggcaaagagagaggtgtgtgacttttcaaatctattctttgaagtaaattgcaaaagatrgccctaggatttgttgggttttggatgcataatagaataaaaaagcaaaccttttgaagtaatgtgcaggatataaagagaaatagattagaaaaagacatctactcccccatgctgagagagattacaggggcttgaagaacctgtttcaaaaacaatcataagatattactttaaaaattcctttatctaaagagctctacaagtagccagccaaagttcatttttcagggctgagaagaaagcttggataatgggaagaattccggggtgggagtgaaaacatctggattgtcaagacagatccctggcccctcagatcttgtctgatttctactccttaagaagatagaggcagctgggygcggtggcttacagttgtaatcctagcactttgggaggcccaggcagrcagatcacgaggtcaggagtttgagaccagcctggccaacatggtgaaaccccatctctaataaagatacaaaaaaaaaaagctgggcatggtggcgggcacctgtaatcccagctacttgggttgcagtgagcgcagatcaggcattgcactccagcctgggtggcagggcgagactctctcagaaaaaaaaaaaaaaaaaaaaaaaaaatatatatatatatatatatatatatatatatacatatatatatatatatatatagagagagagagagagagagagagagagagaggctaggcatggtggctcacacttgtaatctcagcactttgggaggccaaggcaggtggtttgcttgagctcaggagtttgagaccagcctgggcaacatggcgaaaccccgtctctacaaaaaatttaaaaattagccaggcatggtgttgtgcgcctatagtccctccctactcaggaggccaaggcgggaggatcacttgagccctggaagttgaggctgcattgagccgagatcgtgccactgcactccagcctaggtgacagagtaaggtcctgtctcaaaaagaaaaaaaaaggtagagcttttactctgctgactctgttactaagtagctctgactttgggcaagttacttttcctctctgaacctcaagatcatcaatgaaataagatatttgtctcattgagttgttacaaggatgatagagttgatgcaaaacagagcagtgcctggtgtatatcaacggcataggaagtgttagctgctgccgtaatcattcttgcagcttcttaggacaatacagttggacaattccccttctccctttttttacctgtcatttaattcctcacccttggtggcttctacttggttgatttctactgttttcacagttttggtaaagagttattctctggaaggtggtgcagaagagagtaagaccttctctttactctctgaaggttggataattaagtctatggaataaactgaccgtaggcagattaacaggagaaaaaaacattttaattacatgcataggcccaggagtcccacacaatagaagactcagaagggccagatgattgaagtttttatagcatcctgagctacagaagagaatagggggcttggggttcctgggggacacagttatgggaaggtagcaggaggaattgtatgataaataaaggttgtgttgttatgcagataaaatctctcaggtaatcaaagtgatccagcagccttcttttttttttttttttaaaagcttaatgaaattttattttgaaaatatggcaaaagtctaaggcacttcaaatatttaaatacatgtaggaccaaagtaaatgtgacacagtataaaggaatccataaatacagagaactacactatatttctctagaggcaaatacatagccaattcctctaacacaattcaacctttatcattagatacagaattgtgcaattattaacaaaaatatgataatgttacatgtagttcttcatgtctttaattagtatgaaatataaaagttgaaaatactgtgccaatttcatatactctttttttttaaaaaagtcatatttacatctacctagatgaaaccaaatgaaaatattttcttttgtaagtttcatagtttttgagagttctatctagcccagactgaagttactgatgatcaactttcttactttaaaataatacaagaaaaatcaacaaaactgtgctgggatggaattttggaagagctttctaatggtgccacatttggtaaatataaatatttgtggaaaaattttaaaacgtgatgccaatgagaacctgacacttctctgtggtggtggtctgggagtggagagacggaatagaaggtgcccattcaggtcaggtcaggtcacaattccctatggctgtacataacagagcagagactcaacagcaacacagagtaggttaaagtgcaccgtacgcagacagaagatggccagaaaggaggcatgtgtgcccaggctggcagtctctgyactgtgaaagcttcagtctttagccctgggctttatgcttctgtttgctggtgagctcaggcacaatgcatatacattcagtgtctgtcattccaacaggcacagttggcagcttaatggtggcattaaaatggagggctatttgcatacaatcaatcaaatgaaactctgtggcttcattccaagcctaggggtgcccggagactgagcttttgcaaagctgatgtgggcatacagaagaacagtgatgcccttgtgccccacttccagggcgatcgagagcatggtgctgccatcattgtcctgcaggtggacgttgcagcccagctgggccagcagcagcttgatgatctccatgtgcccgtgcttgctggcacaatgaggaccatggagcccttgtcgtcctggaggttgacctgagccccacaggccggcagaccatacaccatgccgatctgcacagtaactgactgcagcatgagggccatctgccccagctgactggctttgaggctcacctttcagccagagttcttccccaacctgcatgtcctctgcttccgcagctgcgagggccgccagcatgatgaaggtatagccccttgttctggtgatccacgttacacatgtgggtgtccaacagcagcttcacaatctcaaaattggagtgggacaygctgtaatggagggctgtgttgctgttgccatctgccaagttgatgacctagtagagggcatccagggaggtagcctcaaaagcagctctgtagtctcccagggtggctgcaatggctaacttctgactggacacgcagaaccmcttgtgctggagggtgttcagacagaacctcatatctttgctggtcacagctttggggtcatttatattatttttcagtaagttgcaagcagacaacattttttcacttaatttatacctccctctgattttcaccttctcaggttcacgttcttgaaactgcatttcatcttccaccctggccracttgaaaccttcaatgttaatggcatggtgccctttggccattccccaagtgtcttcatcctcgtcttcttcaagaggatactactcaatgacactcaatgacatcacactcgtcatctgactcagaagaagagctttcatctgtgtgraaatcatcacttgaagttgttgcataacctccattaatgccaacaaactgaagattctttttcatgccatttgaatctttgttaccatctttcttcttcataatgggctccagtgtactttcattgtttgtgcatatggaggccagcggccatctggttgtctgtcaggttcactagagaccatgtcctttcctgagcggggaaggcatcctggctgctgaccagctttccttctgagatccctacctctgagcagccttcttcctgatacagatactttactaatgtagatttcctttctagatgtamatttccttgtaaaaaggacagctttttagagccattcctgtgtctgtagtttctctgaataatcagctcgaaatatgccaaagaggtatatttttgggtggcacattgtggtctcctccagtcatattttgggatggtgtgggccgagccccagcagaggcaaaaataagayttaaaatcacgtaggacttttatccatcaaggaagacctggttctcctcctcttggctaagtcaagaattgcctgtgctacttaaccagattctttttagatgaactctctgtgacatacttttccaggagcattgctgcttygtcatatggggagcccatcagtgctataaatctgatggcaaatttttctaaacctggacacacacttctagaaggtttcttgctatctctctgcctgcatttttttttttttctggccatgggattgtgactgcctgtttgtaaagggcagtgatgggggtgtgaggaggggaaggctgctggaggaggtagctcttatagtggacaaggggggttggtaaatacataccatactagttttctggggctgccataacaaatcaccacaaaacggatggcttaaaacaagagaaatttattctcttacagttttggaggccagaagtccaaaatcaaggtgctggcaaggccatgctcccttcaaagcctgtagaggaggatcattccttgcttcttcctggtttcttgcttcatccttgcttcttcattccttgcttcttccaggccttccttggcttgtggcagcagagctcccactgccacctctgtctgcacatgggcactctctccctgtgagtctgtctgttaacatggtgttcttcatcaggacaccagtcatattgaattaaggacccatcctactccagtatgacctcatcttaactaattacatctgcaaccaccctattttcaagtcaggtyacatttacatgtattaggggttgggacttcaacatgttttttttctggggacacaattcaacccataataaagcaggccagcacccacccccctcaggtggagagacactgaggcacatattctgcactgcctcccagacttcctctgtggatcatgccccaggtgccacagcagtgacctgcccaataatgcagcctttattggctgcctttaccttttccactgcccactggtgaccctgctggtgtttcctgggatcatctctcatataaactgcttgttttcaaatacttgtctcagggtttgctcctgggggaccctgacctaagaaactatccaaagtcaaggcttatattatgccaaatagtatacctgcacttgcaaccccttgtcttaatatatcctgatacaagatactgggaaatgctcagcatgtactcacatgcacagagtacaatgtctyttccttttttcctatcacagcccagcagaaaacaaaatcctttcctaaagagagattcaggggcccaaggtgaaaaatgatttactgtctataggagagaaaataaaacccagcaatacaccaaatgccagcctggcaaatctcacacacacacacacacactcacacactgggcactgctcacgaggaaagctgctggaagctagagtgcaatgcatatggcaccccccagcttccccctggcatctgccttgttgaggttctgcacattagtacatcttttcattttagtttgcaaacaccccaggggagggaaacgtgaaggtgtagatggtctatcaaagatgaaggagacatccaagagaatcccacccaatacgtgctgctcagacggtacaattaggatcttggggatgtcaccatttcttcaggaagaagtgaagaacaatctagtccactgtttttcccacttttaatcaaaataatttatgtccattgtaaaaacattaagtagtcctgaaaggcttataaatgaggattatgggttgaattttgtccccaaaatgaagaagtcttaaccactggcacccatgaatgtgaccttatttggaaatcaggtctccgcagttaagatggggtcattagagtttctagtattattggtgtccttacaagaagacggaaattcagagacaaacacacacacagaggagaataccatgtggagacagaggcagagactggagctatgcctcttcaagccaagaaatgcctgggttaccagatttttctggtacggtcaaggaaggattctgccctagaactgtcagagggaacactgcctctgccaacaattcagtttcagacttctggcctccagatatgcaatagaatacttttctgttgttttaagccactcagcttgtggcacattgttatggcagccctaggtatctaatacaatgagaaacaatggcctcagtgccccatcctccaaatctgtgtgcagatgcagccacctgtaatttaacttttagatttattttcttatttgaatatattgtcatgatttataatatcatgacaagtttatcgagaaggagttataacacagagctgggacaggaggaaagaaagggtcctattattacaaaatgaaaatacacaccatgccactgtaaaacatagtataatcaggaggccgggtgggtggttcacccctgtaatcccagcactttgggaggtcgaggcaggcagatcacctgaggtcgggagttggagatcagcctggtcaacatggtgaaactctactctactaaaaatacaaaaaaatagctgggtgtagtggcagttgcctctaatcccagctactcgggaggctgaggcaggagaatcacttgaacccaggagatggaggttgcagtgagctgagatcgtgccactgcactccagcctrggcaacaagagcgaaactctgtctcaaaacaaacaaacgaacaacaaacacataatataatcaggagatttcaggtgctgaaataattaattaattgcagtaattacaattctgcagtccaggatcctgacactcacatatatgacaggcttcactgagaaagtatctgttgatgaaagacctaaagaaagggtgtgagccatgtggacacctggggcaaggacatttcaggcagagggaatagtaggtgcaaaggccctgggtcaggaatgtgtttggcatgtttgaagaagaacaagaggccagagtgggagactgtcgtaggaggtgagcttagagaggcagcaggggccaggtcacgcagggctctctgtaggtcctggtaaggacttttgttttacaattggagagttctcaacggatgactgataggatttgctttatgtttataacaacactggctgctgggttgagtgatggctgtaggggaagtgaaggcagaaacacagaaaccaataaggagggcactgtaatgaccctggtgggtcattgtgatggcagggtccaaggtggtggcactgggaatggggagaagtggtagaattctagatctattctggagacagagctgacacgtagggctgctggttttggtgtggcatgagggaatgagaggagaataccaaggctttaggcctgagcatctgggaaaacagatggggagactgcaggagggactggtttggaagggtagagatggggagctcagatttgaacttgttaagtttgagacgtgaatagatacccagcagaggtgttgagctgggtatatgagccagtgctggaggaaaaggcctgtgttgaagactgcatgtgggagtcatcatcatagagacggtatttaaagccttaaaactgggtgagatcacctagagttatataaatgagtgaaagatggcctctgtttattggctcatagattgtttatttcttcattgcaggctgacactgattactgcagaagccaaactcaaatttttacacatccaattattttaaacaaattttatgccaatttttagccattcagggccttgctggtacatacccggtgaaactatacccagcatctgttggccattgataacatagagccttgtggttataagaccttaagtgcgatgttaatcccagcactttgggaggccgaggcaggcagatcgcttgagctcaggagttcaagaccagcctgggcaatgtaatgaaaccctgtctctactaaaaatacaaaaattagctatatgtggtggcatgcgcctgtagtcccagctacttgggaggctgaggtgggaggatcacttgagcctgggaggtggaggttgcagtgaactgagatcatgccactgctctccagcctgggtgacagagtgagaccctgtctcagaaaaataaagccaaaaacaaaaacacaaacctcaagccgtccctgtccttcggagctctctgacccagagactcccctctgtactgctgtgcaacaccacctagacacataagccttgtttctgactctcccctccctcgggggtatccttgcctttcctcctctccttctgagtagcaacacctgtagtgtgtgctctttgcacagactcttgctctaagggacatccccctacccctatgcaaacctgtcagagtgtcaccatcaccaataaaatatgtgtgtgctgctgccatctcatggtcatgtctttctctttgatcagtccccaaatcctccaaacaccctagggagttagtgtagacaagaaaaggaagaagtgcaagtgctgagccctgaggcatgccaatgtttagaagtttcagagatgaggaagaaccagtaagagagatacagaaagaaaggctggagaggtaggagggaaaccaggagagagtggtgttctagaagccaagggaggaaaagcctggcaaggagagggatggacggtgtcagacactgctgataggtccagcggaccgagaaggagctctggatgtcacactaccgtccattgttgcttgctgcccacaccaaacctgcttcccactgtggctgctccaaagggctgctctcccgtttccaccagtgccacaatccgtctcatcacgccactgaaatcagtgatcagcaaagtttttcacaaaggcccagagagcgtgtattttaggctttgagaccatatgggctctatcacaattattcaactttgccacagtgtgaaagcagccattgacaatacataaacaaattgagagtggctgcgttccaataaaacttcagtttgaatttcatgtaattttcccatgtcacaaatttattttattttttatttttattttttttacttttccgcttcaaccacttaaaaatgtaaaaatctttcgttacaggccatacaaaaaacttgtagtgggccagatttgctgcccgctgatttaaattaatcatattctttcttatttttatctcctttcttgaatctgtcaccatatgactttatttatttatttatgaatgacagagtctcactctgatgcccaggctggagtgcagtggtgtgatctcagctcactgcaacctctgcctcctaggttcaagtgattctcctgcctcagcctcccaactagctgggattacaggtgccgccaccacacccagctaatttttgtatttttagtagagaaggggtttcaccatgttggccaggctggtctcaaactcctgacctcaagtgagccaccctccttggtctcccaaagggctgggattacaggtgtgagccaccaagtctggtctatataattatttaatttaatttaatctagtttatagctcctattttgtgtcactcacaggtgacaggagagcactgagaggtcactacccacctaagcatttgattaaggaaaagtattcccaaaaggcaaaagaatgcctgctatcatttcccctggattaatttctccactctttaaagtttgttggcttagaattataacactatgtagaccaaacatccaacagattgacctacccctctttcaaaacaaaatatccacagcaccttgttacctgtcaaagcaaaaatgaaatgtcaaaatctttccagtcttgttttaatgatatctcagctaagagtaaaaaaaaaaaaaaacaaaaacaaaaaagccccaggttattaatagaactgtaaaaagggccttccaaaaggagtgggtagagtatgatattcatttcctatgcttcaaagatyttgccctttctcataaaaactcagatagctgtgggtgcctagtaaaggttaatacggtagttgaaaggttactggttgctttttaagtagctattcagggacttacctctctcaccatctgacctgtgctacatagttaagttcaaggaaaattataatccttttyacaaaaattaatactagcctagaggcaacatcatatttcaagttattagatacactctgttcctttctagcactgcacttaaaggcattacaaaatcaggataaagtgaatcctgatcatggatttttaggacatgcgttttagtatttagtactgttcttgcaatayttacaaccaacactttaaaacaacatgcaaacactccattttttttycccaaagcttcactatgtattgagaaaaggctatttttggcttttcaatatacaaccaatgcatgaatgattgctcagtatttgcttcatacaatttgagtgtacctttaagctaaaaaatgccctgtaatgggtgccatgctatattgccaagtaccctagtccagtggaggaacaggatggatgttacagaatgatttttgtctttgacttcttgattgccattcattaaagtgctattctacataactcctctggtggctggatgtccaaaaatcataaaattatccgttcatctgctccaaaggtgaatgtccattttaaacacaagacaaaaacatcctgtatttagctgtacccatgatgtgcatgcacacagtcgtggttcccagtgggcggttcctggaccaacagcaccaatatcacctggaaactacttgaaatgcaaatgctctgtaccactccagaagtactgaaatcttattctgtggggtggagggcccagtggcctctgcttaccaagccctccaggggaatctaagttttccaatgctaagtttgcaaaccacagaattcaatcatctgtacgcagattaagtaaactatatgaatgagaaaaaaaaaaaatacagattaacttatgctgttggcattggtaagatgagttcacaaggtaacatgagcatgcagggccttggtagctcagaccccagaccccttgctcaagaaactcaagagaaaagatttagggaacggaatgcaacttgcaaaccagtaaccaggagaccagccactactgattctaatctatgcagttttctgttctccttgtccaaacttgattagytacatgtgtgtgtgacaccagcttgcaacacactccgtgaggtgccaatccaggcatgtcctctacaatagacagaccacgtcacaatcggccgaaagcccacaggacatcactgactgcatcactgttagaagaatcacagtaggaaacattttcatttttatttattttttgagacagtttcactcgtcgcccaggctggagtgcaatggcgtgatgtcggctcactgcaacctctgcctcccgggttcaagcggttctcctgcctcagcctcccaagtagytgggattacaggcgttagccaccacgcatggctaattttctaatttttagtagagatggggtttcaacatgtttgtcaggctgatcttgaacccctgacctcaggtgatccgcctgcctgggcctcccaaagtgttgggattacaggcatgagccactgtgcccggccgacatttttattctttaatagcaattaggataaaggactcaaaattgtacttagtaatcacattggcatagcacatgctatttggaaaaaaawttttttttctgagatgttccttgctgtatgatacaggcctattctatgacaggagcaacgcaaacgatgaccatgttccagtgagcaagactcaatctctcaaatgaacaagagccttggctgattctaaacactttctttgctacagcacatgatcaaatgattagagtttttcagagcttagaaagggtaaccatctaatcatgacagagttcttcagcattaataatcaagaaaggcactttagggacatttgacaaggaatgacactaatacaatgagaaytggtctaagtcctgcacaagactttgatayagttcaaatagactgcacactctttctgtccccatgtgtacatacatattcatacaggtggtacaatctatgtctccacttgcatgtgtatgtatatatctrtgtatatataaatatatgtgtgtatatataccaacatctatatacatatgtgtgtgtgtgcaaatgtgtatccataagaccayagagggggaaaagacatttgtttcctttaattgaatagtacacaaaaattctagtcactttatttagaacaaagaataagagtattggcaaattaatgcaaaaaagtaccctactaaacctttctatgcacaaaaaagagcagtaaaataaatactcagaactttcccaggttgtcaactattaaaataaaacctcagcatttcaaaaaagcttattccgctgcaggaaagaaggtggacatttttggtaccataataaatcacacactcacacatccatattgcttaggttgaagagaacggaatgaacagaggaaatttcttccatgaattgccctcctttcggtacccgccatgttttagttacgttgtattattccacttagcttaaaatataaagtcttgtagaaacacatttttaggatgttgaagttctcaagatatttgcacagaatatttagaagtacttagaggagttttgttaaatgcagttggtcatactacataccccatggttgcagttttgacagaccaaatgcatctgtgtcagaaatagacaaaaggcatatactcctccttcctagaaacgggtacatagacatgttcttattcttgggatatgaaaaaacaagtagtaatggcatttaaagtttaattactaactgtataatgcctgagaacaaaattcagagcaattctcaaaagggttaagagtcagactctgggcattttcgttttttagctgcaggctcctcagtctcgtgtgattctaaagtgcttgcattagatttgaggctggtgtctgctttaaggttgtccatggcaacggtgaagccggagagaagataacccccacctccactcatcagcagtttaggatgacttcgatctggcaaaacctaatcaagacagaaaagacattcatgctttcctaagacaataaagtccatgctaacaacacatataccaaaaatcagaatttaaacaacacaggttctcttgatgatttaaatggacatttttttttctttcttttcttttccctccctccctccctctctcccttccttccttccttcccttccttcctccctcccttccttcctttctctctctctctttctttttaagaggcagggtctcactgttcctcaggctggagtgcagtagtgagattttggctcactgtaacctcgaactcctggcctcaagtgaacctcccactttggctttccaaagtgctgggattacagataygagccacggcaccaggctttaaatggaccaacttctaaggactaatttcttcacattacaatgcaaagaaaagtgtagaaattggtttaattgattttcttttgaaaaataaaactggccgggaatggtggctcacgcctgtaatcccagcactttgggatgctgaggcaggtggatcacaaggtcaggagtttgagatcagcctggctaacatggtgaaaccccatctctactaaaaatacaaaaattagccaggcgtggtggcacacagctgtaatgccagctactcgggaggctgaggcaggagaattgcttgaacccgggaggcagaggttgcagtgagccaagatcgcgccactgcaccccacctgggcgacagagcgagactctgtctcaaaaatgaaaaaaaaaaaaaaaagagaagaaaaagaactgaagcagttttcagttcagcccaggtttatctagaaactgaagcatgtttctggcggagaatgggtaatggtcttggcagtactctagaactgtgcatatagctttctttctcctggcttcaggaagcttcatggccaataatggagcttgggtctatggagaagttgctactgaatgtactacactccaaacctcccttccccgctaccctgttaactctgccaaggcaacttctctcctctttctcctgtaaccttagccaagacagacaacctccacaaagggcagggttacccaaggctcaatagcatccccactacagtatggtaagacaccaagcaatgagacggggcctacggcagcatggaggtgctcccctcagatctcccttcatgagggaacagctgagaggcattcaggcagtagaacacctccagctgccgctcctttgggatccactgcagcattcataccgagggaggccatgggttgcttccagtcagtaactgagcatgggtaccagagctggagcatttctgcttaacacagggctccttgaatggcgatctttccacttgggctcgccatcagcctcatggagactttctccagagcagcactgcaggctcttcctaccatcctcctttctctacccgctccttgcccaggcatcaacctgcaccaccaatcttgctccctctccccttrtctttctaaggcatttccctcaataaatctcttacacttcaacttccatcttagcatatgtcttccagaagacctgaactgacacagagcccaccagtaaatcctgaaaacttgctgcaaaaacatcctggcagagaggaaagggccagtttctcatccacctgggaattttgctattgtcaattacatcatccacagtgatactgaggccttggggaaataagaaccataatggtttgcattttaaatgcctttagggcagagttacagagtaatatattctgacataacaagagaaaaaaagggtcacaaaaagtcaggggcatattctctgagtaacagccatgagaaatctccatccctgtagaaagaaacagagacatctctatttttattttgttttgtttttgagagagggtcttactctgtcacccaggctggagtgcagtggtgggatctcggctcactgcagcctcgacctccagggttcaagcaatctttccacctcagctcctgagtagctgggactacaggcacctgccaccatgctcgactgatttttatattttttgtagatacagggtcatgcccagccaatttatgtatttttttttgtagagacagggtttcaccatgttgcccaagctggtcttgaactcctgggctcaagcgatctgcctgccttggcctcccaaagtgctgggattacaggcataagccactgtgcctggctgagataactctatttaatgacttctagtactactgcaaggaaagtcaagtctcgggagggcagctcttgggactggctgtaagaacacgtacctgataatttctgagccaggtttcagacagcctgaggttgatgacccctcccctctcccgcagttttgtgtagcattccaacagaggctgcagacaacaacagaattctgttaagaactacttcctgggatgcagtttaagaatcaacattcagacataagaattcctgcccattccattccagtattacctctttgtactgacagtagaccacaaacggccttgaaggggccacaaagtccagcaaagacagcagcaggggagtggggtggaaacgactagctacaattaaactgtaaggaaaatgccagacaaattatttctctacaccctcaaagtggagcacaggttttaaaatgcatttaaaatgatcatgtatttaatttgcatgactcacaaagagaagagatttaaatataacattctagaaatccaaaacagaatacaatcatgagctatttctttctaggaaacgcgaactaggttagaagctcttgtggtacttggcaactctaagtcgcatttaatgacattcttgattttttaaaaaaaatcacctggaaacaaatccaacactgcataagctgctttgtggatatctgttatagcctgtatcgcagcatttgagtgccccatcccctgcatccagtgggaccacarggcccatcttgatgcagtgatggagaagattcaatttcttctgaaaccctgaaaccagcatcatcaattccccacccctgccagcctcagcctcctttctttaaaaaaacccccaagacaaaatcctcatctcgggtcccactagagtcaaagcagacaaggagaaagagaatgccaatctgtctgaagcagagcccacatgcactgaggagtctcctgccttcttccatcaacgcacccatctgcgtttctttcactcagcagagcggcagcctctaaatgtcttttcctctgctcttcttgtctcctctgtttttcctgaatcttcaaaaagaaaaataagaaatcaatgtactggggtctttcagtcaaatttatggaaatgctctggcctgtcaaaacatttcaacaatatttatcaacttggactaaaccaatagaagcaggttgtttataaggaagytgcaaatacacaagaaagcctatatactataaaaaccatgattaagctatctatgcaacgcttctgtatcctaaagctccatcccgaagaccgaatcacacgtttgtatacatgtacacacactcgttctctgttttgatagttatcatcttgggagctaatacaccaaagccaaactaaatctcatgacttaactgaagttaactgagggactgagattatgggggtggtggggactcttggcatccttacataatcttttttgcttcctctctctttaggccccttatgttctggatcttgagaaattgtttccattgtttcctggtcttctgggtggttgctctctggggcctctgccatgctgtcttcattctcttgtycagaagcctgtttttcctccagtgtgccattactttcttcaaccaaagcactgtcttttggctctgaagataacatcttggcagaaaatgttccatgtagaagactgtccactttgttgagagggaattcataaagaccactgagaaaagatttgggaaatccaaaacatgctgttgctgcccgaacaggtcctcctccagggtatagctgaataatggagccaaaacctgaacagataaaagaaacaaacatctgcccgtggagtgactctagactacgtaaaccctcagtgagtcctccacagtaatgagactgaaggtctttctattagtactttattcagaggctgaaggatggtgcagctcctcagggagtctgtttggagtctatgagtattaccaatggaggtaatataattctaaagcagatagcaggaagactcaaagaagcttatccccacttgatactattgtaaaaccctgtgtctgcaaatttggatgtcacatgattggtgackgactctgcttcccctcactccgatcctcaaatggagcagttacaagttcttaccttctatggggtcagaaaaaaaccagacaaatcaggctgtgttgtattcttccagagagaatacatgcttagtaatcttcccactcaatcccttcaatttaggcccaatgaaatgagcaccagctacccaggagtttactaaaatcactgtcccgaaagccctagccagccacaggctccagcatcatgcccactgacagtgaagctagaaaggacaattgccatgggtttgggggtacccatgggtggggggctgggtgatggagactgtgtaagaaggtccccatgctaggagccgtgcaggttcacccaagtcactttgttaaccctgaagtaattcaatttggctttccatgagtttacatttttggaccacctttactcacatcagggtggggttttgttgaaaatggaaatattaaatcttacctcccattcgttccatcattgcacccagcaccaagcctgcacacgtttccatcacaatcattttgttgccagcacggatatttcccaacgtcaacatctgggctagtgtatcgtatctcatgtggctaaagtaaaaacaataatttgttcatttttagctaagtaaagcctattattttaatcatcatttttcaagttttgtttgctttattaaaattgtgttgataagattattgattgctttggaggtgacagtaaaaggacttacaatttatgaggtaggaggatactttatgcaggtgagcaagctttttcattttacttaaaatcatgactttcttaaagacatatttcccccaattatacttttgaaaggaaacaaagcgtacttaatttttccaggttctcttgcataatacataattgaaagaatacgggtggatggcttcacaacagtaatgatggcttcatatctgggggaagaaaaaacagaacgctgatttaaaaaaatgacttaaaatattttatttgtaataaaatgtatattttataaacatataagaagtttaatattgtgggccttttaaaataaaaactacttacttttttttcttctttttaatatatttatcttgggcaaattctgtcttgtctcggaatgttgtactattttcaattaactgctgaactatttcctataagaaaaggagcaagtagattttctgaaactttactttcacaaaacaagtaatttccaaaggcttcttacccaagaatggatccaatggtctgattctccaatcccttttccacagaagtccaaatagatgaactttatatttctatactctatttggaatttataataaaatacaagtactttataactccacttaaaccaacgtaaaagaacagagatatccaacaaaaggagaagagaggtaaaggaaactaatttctgaagacactggctgaaaacattactgaaaatgaacaaagttaaatcctgatatgsactgttattacattctctaccactgacattagtaatgtcattcacttatattcctgtatataagacataaaatctttgaaatgttgagtaacatgtacatttcaacctatttctatcaaagctataacgttatttttttgttttaccttaggtacagtctgctttaaaaacccaacagtttcctaaatgccaaacagacaaaaacaaaactaaaaatcctttgaatattacctctcctttaatgcccttgtccttcaaagcttttatgtcatcttgagtaagtttctgagatttcccatcatcaactatatttcgattatcagtgcccgcttctttagtctctaaggaaagaaattgctctattgacatttatggtctgaaattatttgacactttctttttctgagttcatatccacatccagtccatcagccactcaagtctggcctcccagctgcactgcccccatcacactatcctttcctgccaaaactactccaagcctctaagtcatcttcctgctcccagtcttgcccccctactatccacctggatgccagagtgctctttgtttaaatgcaatttgactcatctaccccatgcttaaaaccatacagtggcttcccatagcaataagaatacactccaaagatgacctgcaaggtcataaatgatctggcccctgcctatcattcctggcctgatctcttgacactttagcttcagccacaatggccttctttctgttccttgaacacacccagcaaggtcccacagcaggcttttggcacctgctgcttcctctgcctggaaggttctacgacagatgtctgagtggctggatcctttctatcacttgaggctgagctcattctcttgctttaccaaattagtacacgcccctgctttattatcttcatagcatgtgtcacttcaccatcagaaatcatgctgtttgcttgtctacttgattatttttggtgttccaactggtaagcacattttatacgacagtctatcttatgaactgctataattgcagcgccaaattatacctggcatatatttggtgcttagtaaaaatatggatattaatttaaatgtatctaaataacaggtttgactcaaaactttaayagtatttaacttcaaataattacttgtgttttaattaataagatactctcaatgttcattttaataaatataattttaattaacaataacagcttttggacaagaggttgttaagaaataataatagtaatagctaaaattatgggcccttactaaaagcaagacactattcagaacttcctatgagtcatatcatagaacactcaatacaacctaggcattaaatgtgtttatgaccctattttacatatataaggatataagactcacagaaatcaaataagttgcccaacggtacaaggcaagtgatgaaggtagaaattgaacttagctggatccaaaaccagacctcttaacctctacaccatatgctaaccacctcacagctgttacataacttctgggcactgaaagaactttacattatgttcttgcaatgacgcagcaacgactcataggattaaatgcctggcccaagaacagagaaccatttaatggtgggctggagccagaatccaggttatctcatggccaaaggcagtacttgcttcactccactgagctgcagttcttagattatgagttaagatttcttttgggatagcatggcctagcacttgggaattaggtggaggytgagatgtttctgactagtcagttggagagcatctatttcacgcatccaaaatgtgcacctgcagtaggctcttccctcttcttcttgggctgtagacttcctccactggtcacttcaaatgcagttccataactatggccaatgacgttatccaggtagaaccactgtttttcgaaagttacttttctagggaaaaaaagtaatcaattaactgaatatcttttstatccagtacagaaaagacatgttcactacagtttatttcaaaagtggtctccacaatggakgatcagcagcattatctctgaacataaagcaacaaaggaactagagagaacctggttgggatagagacgtaaaattaatgaataagccacaagaacactgaattttggaaaggggaagcaaagactcatcgaagtaacaaggatttaacaaatttcttgggcttggtctgatcggccattttatttgaaaattatctaataaaagcaaattatacttgcaaataaacactgacaatctacacacttggaaatggagcctaacactgacaatgctctactgaggaccaggcaacttgaggtttcctatgacatagattttttatcttattgcaatttaaaagagaaatcccacaggaacacaatsctttcttctcaaaagaaaactaacatctgctgagtgccaaccaggggctaggcagtgtgtgcgaggtgtgattcacactttttgatttaattctcacggtaatcctgggacatagctctttccagaagagcaatccgaggcccagggagaagtatcttgtccaagattcacagttgcaaggtgttgttggagctgggattcaaattcaaatctgtgtctgaccccaagcctcattctttccactataccacacggtctactccagcaaagacctaaggacggtagaaagcccacctagcttcaggacatggcccatgtgcacagaacactgaattctgggaatcatgtggtggttaattctgattgtgccccatcccactccttctcttcctttctctgtgccaccaggaagctgattacgacagaatatactgccacatcacccacgctcccgtgtcagaggcttaccaccattgctggtctctgggtgtgtcacctttattggttccctaaatcggccacacttttgagtcacatcttcattaaagcttactcaaaccatctgagggaaatcctgtatgatcgtaagtgattcagatayggccaattcttgttatttgctgggtccctagatacttacatacaacagaatgtaacagacactcaaaatatttgctaatgtaaacctcctcagatgttgcaattcagctcagcccagatgtgcaccccctatcctcatcctttaatcacctaggtgctttgaaacactggatctggccaggtgtggtgggtcacacttgtaatcccagaactgtgggaggccaggtgggtcacttgagtccaggagtttgagaccagcctggctgacggggaaaaactccgtctctacaaaaaataaaaaaattagccaggtgtagtggcacacacctgtagtcccagctacttgggaggctgaagcaggagggtcacttgaattcaggagtttctctacaaaaagtacacaaattagttactgaggaggctgaggyggaagattgcttgagcccaagaggcagtggttgcagtgagccaagttcacgccactacactctagcctgggggaccgagtgagatcccgtctcacaaaacaaacaaacagacaaaccaaacaaaaacactggatctgagatgggtgggtttacctctctgagagcctatgtgatatgcagaggggatgatgcgtgtcacttaaaactggctggtttgacaggtcactgccccagtcgggaatgtggggccccgttagagggataaggaggccacatctttactgggaaggagtaggatttgcagagtctacttctcagagagcctggactgttttttgcccaatcagatgagtgtagccccaagggtgatgagggagtctgacctgggatgcagctgagctgagagagtcatttcctaaataaaatggaaactgccactatgacttctgcgaagaagagggcctgttgaaaagtatttccaaataaatgtttagggcagtggtctccaacccttttggcaccacaaaaggggaaggtcaactactgttcatgcctgtaatcccagcactttgggaggctgaggtggccggaattacttgagcccaggaattggagactagcctagacaacatagtgaaactctgtctctgcaaaaaaarttaattagtttaaaaaagaaaaaaaagaagaatttaaaaatggttaaaggttggtgcaggtattacatttccggactaaaagaaacatacccctcataaaagaaactttttatctttactaaattagtgcttgtgcaaaaagcttggttatcaccagcttagtgctctggagacttgtttcttgactattttatgatgcttgcttcaccttaaataccagtcaacagtttgcttaaaccaggagtaaaagaattcatctgaagtaagtacttatcagaaattccaaatctcatacttcccagtctgcagaaagctgttctcctgacattgcattcaacttatctctgtcaaaagtaatacaataacctagctcaaaagaaactgtggccaggtgcggtggctcacacctgtaatcccagcactttgggaggccgaggcgggtggatcacctgaggtcaggagttcgagatcagcctggccaacatggtgaaaccccgtctctactaaaaatacaaaaaaaaaaaaaaaagattagccgagtgtgatggtgccagagtcccagccactagggaggctgaggcaggagaatcgcttgaacctcggaggcagaggctgcaatgagccgagattgcactactgccctaaagcctgggtgacaaagcaagactccgtctcaaaaacaaaaacactgtggttgtatttctcagataaattaatccaaatatcccaataaattttcaccattaataagctcttaggacttaacaacctcaccagcccttccagaaagttatcaaaatcccacttctttacttctataaaacagagcgatactagccagcaggtgcacaaaccaaacctaatttggagttctgaggccttgagcaaattgctttttagcaattttcccagcgttgaatcctttggtgagtaaaacgagggaaactcaaagtgattccacactctgtggtgaattgtctccttcatctattctgtgtatcctgcttgggtagagaagaggatagaaagccagactaggtaggagacgtttcattttttgtgggatagatcctgactgggggattagggaagaaggaggatctatggtggaaaaaaagggggaacctgaaggagactctggagacaaggatgagatcctaaagtgaagaaaggagggggtgtctctggaaagacagtgaagatcccaaggtcctagggaaagaacttcaggacaggtgattagggtgtggagagggaggcattggcaccctagggccaagaatggaattctggggaaggaactctgtggaaagactgaaaaggatgctgaaggtggacggccagatatgaaatcatggagggggctccgggaaaaacaggagggttaagggagattatgaggttcgaagacgggatcctggtggaaaagccttctgtgacagaaagacccgaggagacaacgagggcggggaatggggaccgagagagccaagaatggcaccctggcggaagaattctgtggagaaacctggagggagggggtatctacaaggtgggggcgggagacccctaaaatcagcgatctgacttactttctccgctggacttgtactgctttaaacacatcttcacgtttcagcaccacgaagtcgccgtcgcggatgcggtggtctccgggatgctgtggttgtgggcccggctgctcccctgagccctccatgacgctcagccggtcgccgtgctccacggcgtcccgcccctcctcctcggttgtcgccaccgccagcctcacttcccacaacctggcgcactaggagccctccgaccggcaccgcccccacgtgttgcacgccgcttccgctttccggcccagacctcaagaccgcttccggaagcctctcggcttccgtctggccaaactccttgattggctgcactmcgccccgcccctctcgtcttgccgcttctttgagcggaagttggatcactgaagcgccaaaaaagaatttaggggaagacctgattttcgcttgaggcatttttgcggcgctgtgcgctacagacaccttctggaagctgcggtggggaaactgagtttcccgagccgttgagacagatggggttcagcaccgcgcggggacgacaggaaagctgcggctgaagagaactgcggacttggcaggagtcgcctgaggagctaagatcccggagactcttagccccgtggtgcttctctacgggagggagggagggagaatccggccggacagatctgcgcgtatcctggagccggcccagttgtgaactaggagagctttgggacctctgtcccaagcaagtaagaactttagccttaggagatgtaaataaagtagtatttgaagaagcacaggtacccaactgtttctttttactctttctccagtcctacttcttaacgtttttttgaatttgttactgttctcagcatattgtctcgtttgagaagggtatggcacgcagcgttgttgaaggagcgcctcagcttgggaggctgaaagttttatctctgtactgtcgacaaacaactttgatcttgatcggtttgcttaatttctttgagcatcagtttcataatgtgtaatgcctaattattggagccctgtcatgccgttaaatcgtgaactttctagttactatcttgttttattaactaaaccccttttaagtaaggatttgggtagagtatttgataatgaattgcactgcagcgtacaggtatatctttatttacttgtatacttaggatatgaatcatttttaagtagacgtgtattttataagaacagttttggatttacagaaaaactgcacaaaaartggatgtgacactgcaggattgactgtatgtaagaagctatgatgatgtatccctagtgtctcacaggccagaattatgttcatcctgtcctgccctataataagaagtctcaaatactgcaaataagttttcatagagttaattacctgtcctattttcatttctgtaatggggacttgtaaacaggtacagtacctgtccttatttttaacctgtgagcgtctagtatacgtaaaccatatttaatagttattaaactattatggtataccttaaaaagcgatagagattagaaacttaactgcagaatatttgggtcttgtatcatagctgtacaactttgcaagcctgtttgctactcttgaacctagaatacattaatttttccctttttattaatacatttttaagagcactattttccttacagttttggtgaagacctttttaatatctatcttttaggagagatgaatggagagtatagaggcagaggatttggacgaggaagatttcaaagctggaaaaggggaagaggtggtgggaacttctcaggaaaatggagagaaagagaacacagacctgatctgagtaaaaccacaggaaaacgtacttctggtaggtgaggtcaatgattgttcaatttttttcacttaaggaagcaattcacgtctatcatacaaggcggtttatctcatacttcagtttgtcttttatttcatgctactccttagtaagtatttgaacattgatgtcccagatttttactaaaacccctaatttggatactctattaatgagagtctcatttggaaagagaagcatattggaaaaatgttcactctgtttctactaacctagtattttatttttttcagaacaaaccccacagtttttgctttcaacaaagaccccamagtcaatgcagtcaacattggatcgattcataccatataaaggctggaagctttatttctctgaaggtagggtttaaaaagtacaaaaaagcaccataaatcatattttcttaacttgtctttggatgctacatcttgtattactgtaattcatttactaacatatacctgctttaatcttagttcacccaaacaattaaatgatgtttatgtttcaaaagcattttagactttatatcagtcaggaaagcagaaaccatactaggtatttcaaaaaggggacttaatacaagaaattggatacaaaaatggaagactgaaagagcagaaaggaaatattgaggtaactccccagaaagtagtaattcaggaagcagcaaccatccttatggctaagagactaaaagaagttctgaggttaccagartgtgggaattcaaaggttggagaggtcacagcatagctgttattttgacttttgaggggcaccctacaaagctatgcttggacttctgaaggctaccttacagagctgtgcttagaccactaaggcaaatgaagctggttgccactggtaactgagggggcatgactcagtggtgcttggaactggaggctagcactatcgttatcttctgcagctgcagagatgctgaaaagagttggaaacaagaataaattcctttctcttcctgccaccttcccgtctctaaagtgccttcaattggcagaatttaaagagaatctgagacatgtagggtacagatctgaattatagcatcgcagagcaggaagtagaacagtgggcctgaaatcaagggacaataacaaatacagctttgtgtagaaacacaggtaaggaatctccctttgataattaggaataccaattaacctacatcagtctgtataggtgcagggaactgtcttttttgtgctgttaaaatacccatttgtttcttatgtctcatgaggggtgtgtgtgtgtgtgtgtgtgtgtgtgtgtgtgcatactttttatttttttttgagatggagtcttgctctgttgcccaggctgaagtgcagtggcgcgatcttggctcactgcaagctctgcctcccaggttcacgccattctcctgcctcagcctcccgagtagctgggactacaggcacccgccaccacgcccggctaattttttctgtttttagtagagacggggtttcaycgtgttagctaggatggtcttgatctcctgacctcgttatccgcccgcctcggcctcccaaagtgctaggattccagacgtgagccaccgcacccagccgcatactttttttttttaggaaaactagacgtttgaggtccaggaccctccctgccccataccaggcatgcagtagtcattttgtgaatgaatagagtactttacaaatgttttctttattggaaatctgttcgtttttttccatcartagaatctgtttcatgaatgatcttttgttcctttaggatgtattagccaccagcactcccattgctcccctagcagatagctcagaacactataagtgatctttggacagtcctaaagatggagttcaagaggtgccttagccttcaccatctgtgcttccaaactactttattgtactgttcttctgtgagagacatatttgaaaatgtagaactttagagtgttaaaaaaaaaaaggcttttcagttttgccaccagggtcaagtgttggtctgtctcctgatctcaggaaagactgtgattgtgattgtcttcagctctgtcagagtaagagcttagtttatgtgtctggctttggctttattataatttttagtttaagcttattgtctaaattatctgaactaacatgtcctattaggtgtcaaagatgcaaaacaaagtttcccagatagtggggcttttagagagagagagtttctgtctgcatttcacattatgcaaacctaaatttgttttagaatcttaagtttacattctatactagttcttatatgaatgtaatcaaaatacaaagcaattagaaaaaaatcatctaccatgtatatagtgctgcttttgtctcatgaaaaatgtgcatgtacctgtgtgattatttgtgctaatgccatatttgttggattagtttacagcgatagctctcctttgattgagaagattcaagcatttgaaaaatttttcacaaggcatattgatttgtatgacaaggtaagattcctctacagcaaagctaccagtcatgtgccatcttaccaaygtattcgaggtacttgtgattatgatcgtaggcactggagtcagacttccttggttcagacctyagttctgccacttacctgcagtatggactttgattaattacttctctgtgcctcagttttctttcatttggagatagaggtataaatacctacctcaaaggattgttaagaggcagtaatacattaatatatttaaaatatcagaaccatgcttggcacaaagcttatacttatgtcatacttaccattatcacatataaacattgtatgctttctcaaagtctataatagaatgctcagttaatggtaattgactacagaaaagcaattattgttttcatacttttatattttataggatgaaatagaaagaaagggaagtattttggtagattttaaagaactgacagaaggtggtgaagtaactaacttgataccagatatagcaactgaactaagagatgcacctgagaaaaccttggcttgcatgggtttggcaatacatcaggtaactatttgtcttatgcatacttttgtctaaacttttttaatgtttgcacacacatgcacaccttgtctaagtttaaaggaagattttacagtgactgtactttctataagagatacttagcttttacgaaaagatgttggctagaactgagaggttgcagttccgttctgaaagataccattcattctatatacaacagcttatctaaatgaaatatttacctccaacttatttggatttgcttaatcttgctaaagattgtgcagaaattaaactttgctttcaagaagttatacaatctcatagggaagataaaacaaggaatcatggtgttatcggttatgaacttagagcaaaaaagagcaaccttagatttaggttctgtggcatgaagcaaaccactgagtgtccctgtatatcaaatgtaaataacartttgtactgtgcttgcctgagttttttttcagggtcaggtaatacaacatatatgaaaacatttttaactttttaaattttttaaatttattttttatttatttttttgagatggagtttcactttgttgccaggctggagtgcagtgtcatgatctccgctcactgcaacctctgcctcccgggttcaagtgattctcttgcctcagcctcccgagtggctgggtgcaccaccatgcccagctaagttttggagttttagtagagacggggtttcacgatgttggccaggatggtcttgatctcttgatcttgtgatccgcctgccttggcttcctaaagtgctaggattacaggcatgagccaccttgcccggccaaaaacattttttaggctagcaaacagatacatgcttcaaggtaatgaatagcaaatctcaggacaggcatacacaaagtgctggggcattcagaggggcattcttctacctcttgcctgtgctgtccattcaacatagaatccccttcccttcacatggacagattatttgggcctagctcagttgtctgtctgtaaaacctttctcatgaccacttttcgaaacttgcatggtattttgtctgtacatctttatggtccttatgacaattacagctgtatatatgcatcttattttgcctcttaggttgccagcaaactgctgtgtacaagtggtattaaatgtttgtttgttgtttatttatttatttattttgaaatggagttttgctcttgttgcccaggctggagtgcaatggtgtgatcttgcctcattgcagcctcagcctcccaagtagctggkattataggcatgcactgccacacttggctaatttttgtatttttagtagagatggggtttcaccatgttggtcgggctggtctcaaactcctgacctcaggggatccacccactttggcctcccaaagtgctgggataacaggtgtgagccactgcgcccagcgtgtttatattatttaatgttaaatgccaagggagtgagtattaggtattttaaaggtcatttttattttctgtgtcttgattggtcagtgaatatagagaaataggaatgcatttttttttttttaattagtatcaagaggtgatggttttggggactaatgtaagggcttttaatgttaggtttagttgggacagaaagtagcagactgggatgctggagtttttcagcacagggacagcaaaatccaatgtaaaacatccactataaagtaagtagtcataattaaatattagatatttaaagggctgttaaagttttctgtttttattctgtttctgtccataaactttatattctctataaaaatagagttctgtataaagaggatgttttgttttccaacttcagagtaaatgtctgtcctgtttaggtgttaactaaggaccttgaaaggcatgcagctgagttacaagcccaggaaggattgtctaatgatggagaaacaatggtaaatgtgccacatattcatgcaaggtgaggaatttgatgtattaaagtattacttagaatgggacattgaaggccatttaagaatgaaaacgctcattttataaaaatgaggaaatcagtaaaaaggacatgagttccttgccatctcattgatcatcacactgaaataaactcattgaaaattattcaaagacatcatgacagatacttcctaaataaggaagaaaatgttgatttcctaacctgcagatttttgtaaacattggttttggatgtgaacttatcaagaccctgctgtgtaagtttaataatccatgtatgggttgagtatccctaatctgaaaatctgaaatctraaatgctccaaaattcaaaactttgagccctgacacgacactgaaaggaaatgttcattggagcacttcagatttttgaattagagatactcaactagtaatattgcaaatatttggaagtccaaaaattccaaaatacttctggtcccaggcattttggataagggatatactcagtctgtaatacactaagtgttctttgttaaattattaggtttttgttagatacaagggaataatgaaattattttgtttttcttgaattcatctttaagattttaaattcattagaagaattcattataaggtaatcatcagcattttgtttttcttttccagaatttatagaagaaaatttcctagcagttctttaaaaagaacttagaaacccaaaggtttttgaatctgtagattttccttttggcattatttttttccttaaatttyttttttcttttttccttgagaacagcctgtgagacaagaagaaaaaggaagatttagtgttgtttcttgttaagaatggtttggctgggcacggtggctcatgcctgtaatcccagcactgggagtccgaggcaggcggatcacgaggtcaagcgatcgagaccatcctggccaacatggtgaaaccctgtctctactaaaaatacaaaaattagctgggtgtggtggcacacacctgtagtcccagctactcgggagactgaggcaggagaatcacttgaacccgggaggcagtggttgcagtgagccaagatggcacccctgcactccagcctggcaacagagcgagactccatctcaagaaaacaaaacacaacaagaatggtttaattcttgtgatatttctgatatatcgaagggatgatttgatttgagaattccatagttgctcctaaaaggaacttgtgaaaatataaaaaacatcaattttctgttcattacttcctgttttgtctttagggtgtacaactatgagcctttgacacagctcaagaatgtcmgagcaaattactatggaaaatacattgctctaagagggacagtggttcgtgtcagtaatataaagcctctttgcaccaagatggcttttctttgtgctgcatgtggagaaattcagagctttcctcttccagatggaaaatacagtcttcccacaaaggtaatacgttctttaactgcttctttatttatcttggtaaagaaggcaaatcagaatacagaaaacatttcccagtgtttctgaacacagagcttatttttattttttattttcaattttctgcttttatattatgaaatacttcagggtaagaaaaatacagaaataaataaaacattccactactcatcaccccgaatttacatttttcagctccggacacattttttaatgatataaagcattactggcacaattagtgtctgttttttacctmtaccattcccagggatgatcattatcctgaagttattataatatgcatcccttccattcatatttctgttgacttctaggtatacacaccaagttttttttcccctttatttcttctactatttagaagtgatgggttttttaaatctttattagcctttattaaactggattttaaaactatagaaaagtgcagagaataatgtaattaacatttatctactctatgatttggcaaatattaatattattttagcttaatttgtaacaaaaatatggttatataaagttgaagtctttctgttctcagttttattccctttatttgctccctagatgcaaccactatgctgaaattggcatgtattcttcaagtttacatttttattcttgactacatgtgtagagttagttttttgtattgtgtttacgtaaatggtatcctgaatgtaacacgcagctgtttttttatttggttattttgtagttctacctattttaatacatatcaaattctttcatttttactattgtggagtgttgctttaaataaatagccacaatttatccattttcctggaggtagacaattgtgctctttccagttttttataagaacaaatgatactgcagagaacattcttgtacatgtctccttagcagaggaatactaagttgtaggctgtacttttttttttttttttttttttttttgagacggagtctcgctctgttgcccgggctggagtgcagtggcgcgatcttggctcaccgcaacctccgcctcctgggttcaagcagttctcctgcctcagcctctcgagtagctgggactacaggcacgcgccaccatgcctggctaatttttgtatttttggtagagacaaggtttcactatgttggccaggctgttctcaaactcctgacctggtgatccgcctgcctcagcctcccagagtgctgggattggccggctgtacttatttttaactgtattagatgttaccaaattactttccagagtattgttcccaacttaaatctttgctggtagtgttaagtagttaccatttctctgtcttttcattaacacttggtattgttagacttgtacatttttgacagtttgttaggtataaataatactgcatttataatgtgaatttttctgatttctgttgtggttgagcatcttttcatatctttactggccattcagtttctttatcgaattttctatttatatctaatgttcattttcctgtttattggtttattctttaattttgttttttagagatggggtctcattctgttgcccaggctggagtgtagtgacatgatcatagctcattacaaccttgaactcctgggctcaggtgatcttcccatctcagcttcccacgtagttgggactacaggtgccagccactgtgcctggttctattagtttattgataggagttctttatacattctagatactaattattgttgattatatacattagatattttctcccagtctttggtttgtcttttaactttgtgggtttttttgttgtacagttttacattttgacatgatcaaattgttgtcttttcctccctaatttgtatattttatgccctgcttaagaagccgttcttcggctgggcttggtggctcatgcctgtaatctcagcactttgggaggccgaggcgggcagatcacctgaggtcaggagttgaagaccagcctgaccaacagggagagaccccatctctactaaaaattctaaattagccagacgtggtggcacatgcctgtaatccaagctactcgggaggctgaggccggagaatcgcttgaacccaagaggcagaggttgcagtgagccgagatcacgccattgcactccagcttgggcagtaagagcgaaactccgcctcaaaaaatacataaataaataagaagcccttttcactcaagcattataaacatatttcctacattgcttctaagaatcctaagttttgttttttatctttagatcttttgtccatctggaatttaagccattggtgaagggcataaaactagggatttaagctgggcatggtggcatatgcctgtagtcccaactactcagtagtctgaggcaggaggatcgcttgagccctggagtttgagactagcctgggcagcatagtgagacccccatctcttaaaaaaacaaactagtgatctaatttttaggtgaaaagctatttatcctgacaccatttattaattaagcccttgttaccatggatgtataatgtttcctcggtggtacccagagtcatcgttatcaccattgggctttamtaaatttaacatttgctaaatttttgctcatgtgaagggttgaatccttagtgaggtaaatagtcccttgaagaattaaaaagggaaacataagatgtttatgtttgaaattcctaaggcttctttctctgactggaagaagagggtatgtgagattcagctattggttctgaataatcagtggtgttgatagatgggtttcatctgrtgtttgtcttggcttaaggttcaaggtataacctttagcttagaggccagaatttaaatcctgatttaaaccagatattttcttccttttattttgaagacggggtctcactctgtcacccaggctggagtgcaggggcatgaatacagctcactgcagccttgacctccttaaatcagatattttctagacagtatttgttcagggtattttcatgccccctaataaattaggtagtagcattgactcatgtgtgatgtcgtgaagaggtcctccatttgtctgaactgtggggctttgaagtgacagaaagatggctgtttcagttgatctctattcccgccactattgttgcgtaacacatcactccaaaactcagtggccgaaaataaagccaatcattttattagttctcatgatatctgtggatcaggagtttggaagaactactcaactggctagttctggctccaggcctctcatggagttgtagtcagatggtggctggagtacagcaaggtggctgggggctggccaggcatcttcttctccatgtggctgtgtgggctagtttgggcttcttgcacacagtatagcagctcaggcactcagtctgcttatatggctgctgacaggttcaggtcaagaagtgcagttggtaggcagaaatggccttgccttttgtgagctagtctcagaagtcgtgcaacatcactgtgtcacattctgttggtaacaaagtgagtcmcaggccttctcaaattccaggagaaggaattagccttcatttctttttttttttttttttttttttttttttttttgagacggagtctcgctctgtcgcccaggccggactgcggactgcagtggcgcaatctcggctcactgcaagctccgcttcccgggttcacgccattctcctgcctcagcctcccgagtagctgggactacaggcgcccgccaccgcgcccggctaattttttgtatttttagtagagacggggtttcaccttgttagccaggatggtctcgatctcccgacctcatgatccacccgcctcggcctcccaaagtgctgggattacaggcgtgagccaccgcgcccggccttcatttcttaatggaggagtagcaaggttctaaaaagtcttgaagataaatattgttgcaatcatatttggcaaatacagtctgccacagtctgaatttataaatgcttcttgagatccaaacaccaaacaagtgcctgtgtggcataataagtattacactctacagaaagtgcaaaaggagcctagatgagaaagctggggattaaagaaaactctggaaagccttttgaaaaggagaggattggcattgggcatgtgggacagaatgagagggttgttgaaggagcgagaggtggcatgggcacagaggaagcaataagtgcttcrtgtgggaggcaagcaaagcaccttgcatacccatagcaggatamgaacagtaagtgagaaggatcaattggaaagtgcctcaaaagctgtcgatattaaattgttgcaggaggaaatagaaagtcattaatctctcagtggattttactttactagcatcctgagaccaacttttaaaacaatattaaatgaaatgttttaactgaattttcctgaggtgtgattatagtttatcaaaatctgaatgtgaattacttttgtttcattcagtgtcctgtgcctgtgtgtcgaggcaggtcatttactgctctccgcagctctcctctcacagttacgatggactggcagtcaatcaagtaagcgatcagactgttacataaaaggcaggctttagatgtcacactgttgagaaaatccataattttactgtattatattgtacgttttatctaaatgacaaagtgtataatagtgtataatagatggtttatttgatgaagagtttgtatgttaaaataattctttttttttttttttttttttgagacggagtcttgctctgtcacccaggctgcagtgcagtggcgcgatcttggctcactgcaagctctccctctgggttcatgccactctcctgcctcagcctcctgagtagctgggactacaggcgcccaccacaatgcctggctaatttttttgtatttttagtagaggtttagtttagaggtttcaccgtgttagccaggatggtcttgatttcctgacctcgtgatctgcccgcctcagcctcccaaagtgctgggattacaggcgtgagccaccgctcctagcctaattgtctttatttgaaatttattctctgtcagattccagaaaggattcattatgcaaatattgtgtcctaatgagaaatagttgattttatatctcaattatgtgattaattgaactggatataggccataagcaaagctgtgtgcttcattccatattgagctgtgatagaaataatattgttttgaagttttcaaataaagactccctttgaaatggcatgtttcattttatgttctcaatgttgcaatggggcattttactatagggttttttaatagctttttttttttttttttgcaagtcagagttttctttgtgtatgtgtttttcatcccataattgattacattttttctagctgtagatctatagctcatccctaaatataaaataatgaatggttttgaagtcagtgctctctagcaaacctggctgaaatgagatggtcctaagaactaagaacctagggaaaagataagatgatctgctgctaactgcttcacccccttcttccctgaaaaattaagaccaacatatataataattaattgtactatagtgagatctttacaaacaccccattttataaaagaggaaatggttaagactcttgagtatgatcgtgtggcctatgagtatggtagagcctgatttccaacctagtctgtgggacttttaccacttaagagggacaaagggttagtctggaggtagtaagttatttcagttgattattcacagtcacttacagatcaaacttcttgttctactctttcctcccttctcactactgcacttgactcatcttaaaaaagtgggtgtggggggtgaattgattgtgaagtggtgagtgatcttggagcaaggtttgaagtcgtgcaggttaggtggatgccagcgcctggcccatgacctgaaaaacattgagaggtagtctagatgtatgatgaatgtattccaaagttattattttaatgttcaatgattgtacttacattaattaagtaaaaaaagctttaataacatgtgcatgtttttaaaaattcaatcagtgtggaaaggcacagtccccacaacttgctgttacattatacataactttagataccattcttgtgtctttcatccttcgctttactgcagtcattctatgtgagctgaggacattagaaacatacttgttcttttatcttctagactttctccgttccgacattactttaaattgtcaaggtttaccttttgtcttctaattataattgtcttccagagtttatttataggtcatgtctaacaaaaacaataaacaggcatttacatttttatgttaataaaaatgcccgatatggcattccccgggataaataatatgagcttctgacttctccctccatcttttctactcctacttgcgtcttcagtggtcgaagccagtgctggaactggctggacagtttatccccccttagcaaaaaacctagcacatgcacaagcctctgtggatctgaccatcttcacgttccactgtctcttccattttaggggccattaactttattaccagaataattaacataaaacctccagctttgtcccaatatcaaacaccccttttcgtctggtaagtccttattatggcggtccttctactcctttcccttcccattttattaacataaaaatgtaaatatagctcaacaaagaaccaaatgaatgatcaaatgccaagcaaaggagctgtaatttatgtcactgggttttgttttgttggtttttaccccttaaatgaaaatgactcaagcatcaaattatcttttcttatactctgctagttatttggaattatcccacattttagtgtgcatcatatttggactgtaactttgtcatttagtactttatttttcctaaggtttctaagtgctggttttacttcttagagtatgcctgtaccatttcaccataattttccattctctcttcaatatactatggaatacatggaatccaccttttattcttaaaaaacaaaaacaaaaaaacacaccttccttctgcttgagtctggatcagtagttctccagacctgcattcctgcttcatcctgggatcttgcttcattgcattttttctaaggaatattcccaagtaaattttcagaaagtatacaggacaggtaaaaagttctaagcccttgcatgtctgaaaatgtctttatttggatcttagtctggctaagagtttgctagctattgaagtctatttggttttaattttctctgctgtttatgagaggtctggtgctcatctgattctcattcctttgaggactggacttttcctcctctttgtaaccattttatctatcatgctgtgaaacagtgaaagtgtatctagttgtctctatcctgcttgattggcaggatcttttgtcttcaactctagaatatctgactgatttctcagcttcctatcagatgcattgcttggattatttgttttaagtttttcctcattctttcattttctttgttctgttttctagatttctttggctttttcttatatcttctctataaatgcttgatttttatatacatgctttaaattttcttgattttgtacttgtttccccattgttccctttttgtagtggcttattcctgttttatcatggcaatattttctcaaaactcttaggcagtttgtttttaatactccctgaattattgccatttaattttcaaatgtctgatgaggaatgagaaagtatttgaagtaggtaggataggtttcctttgcaattttttaggtagtagttttttctcacaagactttacctctaaatacaaagataggggtttgggctatcagattttgctttatgaatgtgtttttgaattggaattgggtttctcagatggtagaatgaagagtctttattctgaagctctgatattctcactgcacagtttagctcccttcacagaggggatgggtttgtttccttagaacagtgctctggtttttgccagatgataaagtacgcattcttcccctacccacctgtccactcaccttctccaaaaattctcaacagctattccatgacttgtctttcggttgattactgttttcttccagccatctactcctgctctctattcctgccacatccaacttggaagcttctctggggctctgctaagaacgttgggtcccactttgcttgtacgcttatagcttttgcccatgtgtattctggactttattttgttttatccatcaatactttaccatttgctggtttcaaaaatttcattaatatctcatttgctgatgatacctctacatacccccaaatttttagtgactcattttggtggacattttggagggaggctaggcaaatacatatgttcatttggctatcttgaattggaaactgctgaagtaattttagatataccattaaactgttaataagcaaatctgcttttatcttcctcagcatcatgtgaaccctgaatagttaatatcttgcagaaaccatccaaagtaagtattctaactgaaaactatttaaactttttagaatccaggaattgatgtctgatgatcagagagaagcaggtcggattccacgaacaatagaatgtgagcttgttcatgatcttgtggatagctgtgtcccgggagacacagtgactattactggaattgtcaaagtctcaaatgcggaagaaggtagggtacaactcttttcattatttgtctctcaataatgattcatcaacgttcatcttttctaagatgctcctgaacctcaaataatttgaggaatttcttgttgcttacataagatgaaacattcccttttaaaaaaacatgtatttgtagctccctatgactttgttttatattctagttgagtcattgtagggaaaatgaaaataccaactattgtatttaacacttttaatttacaggttctcgaaataagaatgacaagtgtatgttccttttgtatattgaagcaaattctattagtaatagcaaaggacagaaaacaaagagttctgaggatgggtgtaagcatggaatgttgatggagttctcacttaaagacctttatgccatccaagagattcaagctgaagaaaacctgtttaaactcattgtcaagtatgtatgctgtcatttgaaattttattacataaatgcacgttgggggttctcttggctacaggtaacaaaaaactagtcaaaatggtcggcaaactacagtccatgtaccaaatacagtactccatccccttgagtatggcctatgaactaagaatggtttttatattttttaatggttgaaataaattaaaagaatatttcacaacacatgaacttatatgaaattcagatttcaactggatatggtggctcacgcctgtaatcccagcactttgggaggccgaggcaggcggatcacttgaggtcgggagttcgagaccagcctggccaacatggtgaaaccctgtctctactaaaaatacaaaaattggccgggcttggtggcgggcgcctgtaatcctagctactcgggaggctgaagtgaagaatcacttgaacccgggagatggagattgcagtgagccaagatcgtgccattgcactccagcctgggcaacaagagtgaaactctgtctttaaaaaaaaaaaaattctgatttcagtgtccataaataaagttctattggaacatagccacactcattcatttacataagtgtgctgcttttgtgctacagtggcagagttgaatagttgtgacagagaacatatatatggctcacatatttttgctttatccttttatagaaaaaatttgctgatctctagtttaaacaatacagaatatttactatcttatacaagaagtttgtcactcaacggaagagtgagggaacagtgaattccaaagccatttcaattagttctgtgtagggtgttgctcatagagattcaaatcgaattaacatatattcaaaaagtatttgataattttatttccatgctattgccatgccgtggagaagcagcaaagtataggcattttttgctttagtggttaagagcttttctttggagacaaacctaagttagactcctgctttgggcatttacttccagtgtgatctgggacatattacttaatttcccctttatttgtatcaccttaaaatggaaataataagacttacctcagaaggttgttctaaagattaagtgggattttataatgtacttaacataactactgcaacatactgttacttttgataattttttgacaactgtggggtaattttgaagaaataggagaaaatgagagagactgaataatagatatatctaagagaggtaaagaactgagaacgttttgaaatgcattgtattataaaaagtgatcttggccaggcacagtggctcaagcccgtaatcccagcactttgggaggccgaggcgggtggatcacctgaggtcaggagttcgagaccaaccggaccaatatggtgaaaccctgtctctactaaaaatagaaaaattagctgggcatgatggcaggtgcctgtaatcctagcttcctgggtggctgagacaggagaatctcttgaacctgggaggcggaggttgcagtgatctgaaatcgcgccactgcactccagcctgagcaacagagcaagactctgtctcacaaaaaaaaaaaaaaaaagtgattttgtcatgcttttctgttcagtaggctcaggtctgtaagaggatttgatgctttttctttctggctttaatatgttaattagctgactgagtaaagaatagtgctccacaggggttttttgtccttaaatcctacttccctctgaataaaagccattcagacccaccctggaagagaggctgctctaacttagcgttgctggggtggtcttggagtgagtcctttgagcaggtggccaaggaagcaacctggtcgacaatccaaacatctttggttcctcttaacagttgtaaattaaaactgaacatttttagtggtccctcttctcccatacttatagaagagtaagtatggaaaactttagttttcttcccacagtttgctttttccccctccatgtttgtgatttcagcatcaaaactagaatttttcatggtcctctattatcagtctagcagagattggcaaactaggcaggctgcctgtttttgtaagtcaaattttattaaaacacagccccacccagtttacttacattactgttcacagttgcttgcacactacaagttgaatagttgtgactgagacagtatagcctgtgaagctgaaaatactttctggccctttaagaaaaagtttgtcaacccagcctaggtgacagtagaagtttatgttttagtttaggttccttcagaagcaatgatttggatcaacatagtttacttgggaggtgattctggagttactggtagggaaatgatggcagccagtgtaggtgccttaacgaacaggtgacccactagcatctgggacataatcctcctgggccagtggaaaactccactgtggaaagccagcttcagtatttttccatttaagggcctacatttgggactgcccccaggagtattaaacacctcagcacttctggcctgcccatcctgcctgccaatgatgcttgtgtggccatagaaaggtctttggcagacaggtgcagatgccagtaggaagccggaacatactgaacagtgagtgccaaggggatatgagcacaccaccacctccttctgtgtttacatatattaaaagggaataaagactcatgttttactcctgattttctctcccaccctatttttgtttgttccttgtttataaaattgacaaatgtaaatgtactgttttatattctttctcttaattttttttagagacagggtcttgctgtgttgcccaggctggattgccgtggcacaatcagagctcactgtagcttcaaactcctggccttaagttattctcccacctcagcctcacaagtagctaggactaaaggtgtatgccaccatggctggctaatttttaatttttttttttatagatatcggggtctcactttgttgcacaggctagttttgaacttttgggctgaagcagttcttccaccttggcctcccagagtgcttgctgggattacaggcatgaacctgtaaaccaaaaataaaattccaaggccccccacccatttaaacagacttccttctcagccagggctcttaagatttaacctgaaagactgattcaggccacaaagggaagtgggggtcagacatgccttattatacctctctggcattaacatcaacacagattttaagtctaataagaaacattttacagcctgttctctctgaaacctgttakccaaagcttcatctgcatgataaaactttggtctctacaacctcttgcatcccaaacattcctttctattgatcccaggtctttagacaaactcaaccaattgtcaaccagaaaatgtttagatttacctgtaggctggaagcccatgctttgagttatcccacctttctggactttctggttctacaaatcactgcacctggcctcattttcttatttaatttgaccttttgacttgaactgaaaaaaatgaaattttatcccatcttagagtattatatactgagttcacttctcagtctcctttcagtgacttggctgcacagtctcaagatgtctgttcacataaaatacaatataatcccgtatcctaaaatggaagaccatgattgtgacgcattttaaggctagttgtgtaagaagagcaacattgtatttagttactttaagatgctttgcaagtatcctctgttccttatgcagagtttttaaaaaattctaacctttatagattaaccaagaactttgagaaatgtactgtaagaataaaatttcagttgaggggatgtaaattttttacatttgtctttgttgatattaagcaggttaaacaaattgtagaggagatctcctaatggatcaatgaagtataaattagaatttataagttgtgttctgtttttcagctcgctttgccctgtcatttttggtcatgaagtaagtattttacttcatctttactcaaaaagtatataaggttagcaaaaataacatataaaaactttacagaaagtagcaaatttctattggccagttatttatatcttaatatgctttgtaaattaatgatatgggaggcaagcaaactatagcttttttttttttaatttttttaattttttgagacagggttttgctctgtcacccaggctagagtgtgatggcacagtcatggctcactgcaacctccagctttggggctcaggtcatcctcctgacctcagcctcctgagtagctggaactacaggcatgcaccaccatgtgcagctaatttttttgtattttttgtagagatggggttttgccatgttgcccacgctggtctgtaagtcctggcctcaagtgatccacccaatttagcctccaaagtgctgggattataggtgtcagccgtatagctccttttaagaaaaaacttttaccaactagagtaaatatgaatgggcttttattttatttatttatttttttgagatggagtcttgctctgtcgcccaggctagagtacagtggtgcgatctcagctcactgcaacctccacctcccaagttcaaacagttctcccacctcagcctgccgagtagctgggactacaggcatgcgccaccagacccagctacttttggtaagaaatgggcttttaaagtgactagacactgccagtattaaagcaaaaacaaatatttctcgtttttgtggaatggatttatgccttgcaaggtagctcttagtaatttctaagatagctctgattttatatgttttcaagtttttactttttaatcatttacgtgatagaagtttgtttttagacttccttttcttagaaaaaaattatcatgcttttaaaacaatccccaaacaaattaatattatagaaggaggaataccccctttactagtcacctttatgttttccttacttctgttttttgttcttttttcgcacttgagcttgttaaagcaggtttggcattagcactctttggaggaagccagaaatacgcagatgacaaaaacagaattccaattcggggagacccccacatccttgttgttggagatccaggcctaggaaaaagtcaaatgctacaggtagacaatcagtcatttagtgtttgttcttttgcttgtaaaatgcgttaataattcacaagtgaattttctcaaagcatgtagtgtgtgtgttccagaggacatggttaggtggcgtaaatgaattggaatttgtgtgagtaatatgtaacttatatctgaccatatttttaaattgagccagtctcctgttacagaggctgtacaaacatcttggtctgttgagacatcaactattaggaaatattaaccatttctctaaccattgttttgctagtctttgttgttgttagttgttatgtgacctcacctatgaacagaatagttcaggggagttaaagcagggtcacctattctccctcatacaagtacataaacactgtattgggctttaagaacagtctgctaaaggtgtgggatctgtctgtatatatctccactgcttgtgagtccaaatcaaggcaacctttttttttgagacggagtcacactctgttgcccaggctggagtgcagtggcatgatctgggctcactgcaacctctgcctcccacttttaagcaatccctgtgcctcagcctcctgagtagctgggattataggtgcgcaccaccacgcccagctaatttttgtatttttagtagagacagggttttgctgtgttggccaggctggtcttgaactcttggcctcaagtgatccacccaccttaacctcccaaagtgctgggattaccggtgtgagccaccacgctctgtccaaagcaaggcaactgctgtgatcagtcatttgtagatccccaagaaaattctgcctctgccagtcagagcctagtggttttcctttcctgggttttatgatggctttagaaggtgctgcttattggtatgcttgtagtttccttaaagtgacaaccggtaagccagccgtaatgtgctttctactttatttttttgagacaaggtcttcctcttttgcccagactgaagtacagtggcgcaactttggcttactgcagcttccaccttgggctcaggcaattcttccaactcagcctctcaagtagctgggactatagacatgtgccaccatgcctggctaatgctttttttgtagagatggggttttgccatgttgcccaggctggtctcgaactcctgggctcaagcagatccacctgccttagccttccaaagtgctgggattaaaggtgtgaaccactgtgcttggccactgtgctttctaaaaatgcctgtggcccccttcttcactcgatgtggaaaattgaccagggcttctctggccctttagtaagttgtagtagtatggctcctaaatctttttccaaggattgggatcctggctgcacatcttaattacttttggagctctttgaaaataccatagcccactgcaagccaattgagttaagagtttctaagttagggtcctagtgtctatatgtgtacaacagtccacagatgattctaatatgcagccagccttgagaactgctttgatcttgtcattacattataaacccactgtccttcatatctgagtcatcctttattgcctgtggttgagtgttaaaccagtcattttaattcctagatattattataattccatagatatttcatctatgtttggttccttttggccatctggggctactttttaaaaaataaattctgttctgagacctcgctacaatgtagcctgacaacagaggctcagggtaccccttacaggtgaaacaaagctcatcatgaacaggaatctgggtgcagtggcttacgcctgtaatcctaacactttgggaggccaagtcggaaggattacttgaggcctggagttcaagaccagcctgtgcaacaaagtgagaccctatctctacaaaaaagaaaacaattagctgggcatggtggcgcacacctgtagtccctgctactccggaggctgcagcaggatgattgcttgagcctagaagttggagaatgcagggagccatcgttatgcaactgtaccccagcctgggcaatagagcaagaccctgtctttaaaaaaaaaaaaaaagaaaacattatgtttagaatatgtaggaaaagatgcaagtggggatctgaattgttacagctttcttttctgtcttttgtgtggtatacctgttcgtgtgtgtaactttggaattagtgaattataggtgggagcctgttttaacccctagagtgtcttatctgtacaaatctcataatttatacatactgcttgcagtatataaaacttcctttttttgctctttttttttttttttttgagtcggagtctcgctctgccgcccaggctggagtgcagtggcatgatcttggctcactgcaagctccgcctcccgggttcacgccattctcctgcctcagcgtcccaagtagctgggactacaggcgcccaccaccacgcccggctaattttttgtatttttagtagagacggggtttcaccatgttagcgaggagggtctccatctcctgaccttgtgatccgcccgcctcagcctcccaaagtgctgggattacaggcatgagccaccacgcctggcctttttttttttttaataaatgtttcttggcagatagttgttctaaaatgtgtccagtggtattgaaagtgttaataccaagaagttacattggcagtttttcttgttttcagacctggaataatgcctttggctcaatttaaaaatagaatctgtaatgttagtggaaattaaacatcctgaatagagtatggcatgtaagccacactaagccagggtttttaaaaacgagactaacaggctgggtgcagtggctcatgcctgtaatcccaacactttggcaggccaaggcaggaggaccaagctggacaatatagtgagatcccatctctaaaaacaattttaaaaaaaattaggtgtggtggcatgtgcctatagtcccagctactcaggaggctgaagtgggagaatcacttgagcctagaagttttagaccagcctgggcaacatagtgagaccttgtttcttacagaaaattaattagccagtcatggtggcatgctcctatagtcccagctactagggaagctgaggttgttgtaaccatgcgagttatagagaaacgccacactttgagacaaattaaagagtcctttattagccagcgacccagagacagctcacgcccaaaattctctcagccccgaggaaggggctagttttgtttttataccatggtctaaatagggaggggggattttagctgaagcaatttttacagaagcagaactggcagaaagttaaaaaaattaattggttacaaatgcagttacaaaaaaataaacagttccaggtaccggggcttaaactatcacaaagagataaatgtaggggttttgggtgccatgcactgcgcgtgcccccaggagctgctggtgcaactcgcctcagcatctcatcaacaggtgcattcctggacgtgctttgagtcagttttacactagctatgcctggagggaggtgaaagggtttacaagtgaagaagctaaaatggagtctgtccggctctctctctgctaggagagagtcactcgggttaaaacaaggtaggatatcacaaggtgggatgatcacttgagcccaggagttcaaggttgctgtgagctaggattgtgccactgcactccagcctggacgacagagtgagaccctgcctcaaaaataataaatataacaaaacaaattaaaaattaggctaacaccaactgttatgaaccatttactttatatttttgtgttttcttcttaccacctagtaaaccatcatactctgtgtgttataaggtttctcagaaagactatataagtaacaaaaataatgataattactatttattgagccagcagcataggataacagtgggtgtttgagatgtgaatactgtcccctagaattgggcagtgcactgccatacacggcagttttacattgggcacttatgtgccaggtaccaaattaaatgcctttcatacatgatttcatttattgttcagggcaatgctgtgataaaacataaggaagctgaggctcagagaggtctgagagycacacagctggtgcatggtggagccacgatttaaacaggtctgtctgactccagagagctatgcttttaactcttgtgctgtttacttttctggcctgttatagcatgtttgctcagaaggtgagcatgtattaagtcactttattacctgatgtttaaagaagcattggaaccttcaaaattaaaattggtactcatgtttttgcttttcgaacttgaaaatgaagcataaattggaattgtgttgagtatttatatgaccacagacttcagaatctgactgcctgggtttgattgaatcctgactttccaccttgatagctgtgtagttcctcattcactctttgttggccttggttttgacatcagtaaatcaggatataataatacctttctctgctggtgatggtgcaccttgtacactaaagctcttaaaagaatacctagcatatacctaacgtttgtgagcaactgctgttagctattacttcccttttactttggatgattctcttaaactttttgtttccttaggcagcgtgcaatgttgccccacgtggcgtgtatgtttgtggtaacaccacgaccacctctggtctgacggtaactctttcaaaagatagttcctctggagattttgctttggaagctggtgccctggtacttggtgatcaaggtgagaggccaaagggaataattagtgattctgggactttttgaaaagccttttccttttcagttaatttctttacattctgtttaagagaaacatttagatagcaaagtcctaaccagtaagttgacactgtcagaaataatcattggaaatgcagtatcatcatttttatactacagaattggaactgtacttaatgtcattcattttcagaatcttatagccgatacaagtatatgtaaaaatcaaataaatatgtgtagctccctgaacttcccatttcataccacctatcayatttgtgatcattttttttaaaagcctgttttgaagctttgtagtaagctccctgtatggtgggatttggatgtcttgtggactgccatgttcccattgcctagtacataggggcacagtaaatacttattgaatgcgttactatgatttagctctaaatagtttggaaaccttggcactgacaaaaaggtggatgtcatcctttgctcacagaggacttgcaataggagattacaggtgttactttcgatgtttttttctttttatgagacagagtcttgctctgtcacccaggctggagtgcagtggtgcagtctcagctttctgcaacctctgccttccaggttcaagccattctcgtgcctcctgagtagctgggattacaggtgtgcgtgaccacatccagctaatttttgtatttttagtagagacggggttttaccatgttggccaggctggtcttgaactcctggcctcaagtgatccacccaccacacctcccaaagtgctgagattacaggctacaggcgtgagccaccacacctggcctacttcagaatgaatagttttgccgtattgtaactgaactcattggttttttttcaggatttgagtgacaggtggtaagaagtccaggcatagggcccagcaagaagaaacctctacattgggctttgtcacctaagtttctctttgtgatgccttcaccttattgggaaaacatgtttccatgcatgtgtcaggcagtgtccagattccagtccagttaaggtcgttcattccttctggtttgccagtgacttccatattctgaacccaggacctggtagccacatttgacacagttaatcactccctcctccttgagaccsttgaaactctcattggtttccaggccactttacttcattctttacttctttctcagtcgtttactggttcttcatctccacaacctcttacctgttgttaactaaggtgcttagttcttggaccttttgtcttctgggtctgtatttaccttcttggtgatcttgtatcgtttcattggctttacctacctatccgtgaaaaattctaaatttataatctcgtttcccttaaatatcaggcacatacttcttattgtctacacagtatctccacaaatttctcaaacttaacatgtctaaaattaaaatcctgattttgcctttcaaatctattttcacagtcttcctcatctcagtaaatgacaactctcattataattgctcaaatcagaaaacacggagccatccttgactttttctcataccccacattaatctgtcagcaaatcttgttggctgtaccatcaaaatatatctgctatctaaccacttcttcattaccctggtccatggcaccatcatgtctcacatggattattactgtaatctcctaattggcatgcctgtaaccacgcttgccccttcctgttgtttttaatacagtaatctcattaaaaattagattgtgttactcttgctcataaccctccagtaactgcccgtctcgctcagagtgaaagccaaagtcttgagagtggcccagggccattcatgttctggcctttcacctcttttgcctccttatctgctgcttcccatgtctcctcttctctagctccattggtggctctgccttggacaccaccagcacaccaggcacgtcacatttcctcataagggcctttgtacttactgttcygtttgcctggaatgttcttaccccagatagagctgcaaaggcttgttttctttcccccttaatgttttgctgaactgtcctgaccccagtgaggtcttccctaaataccgtattttaacttataacctcccctgcccctgctgcaccttagcagaccttattttccttaccctaatctactttttccttccatagcactttttaccttctatattgtttacttttttattgcctggaccccctattggctgagtagaacataagcttccaagagcagggaattttgtcttttcagtgccatactcggcattcctagaacatagtactggtatatagaaggcattcagtttattgaatttataaatttattgcatttatatctagtaaatatttgctgaataaataaataccaaaaacatgtatctcgttattatatagctcatcagaagtgagaatatctttgctaagttaccaggtaaaatatagtaataaaaagatgatactcatgaaaccatgcaacttcattaactagaagtagaaggtgatttggaggttttttaaaaaaattttaatgccagcactttgggaggccgaggcaggcagagcacttgagaccaggagtttgagaccagcctggccaacatggcaaaaccctgtctctactaaaaatacaaaaattagttgggtgaggtggcgcatgcctgtaatccctgctgctcaggtggctgaggcacaagaatcgcttgaaccaaggagatggaggttgtagtgagacatgatggtgccactgtactccagcctgggtaacagaacgaaactctgtctctcaaaaaaaaaaaaaaaaaaagttcaaagtttatgttttatgctttaaaacaaggggtcattaaactttggtccataggtcaaaccagccaacagtgtgttttagtacagtccacaagctaaaactggcttatatatttttaaaagattgtaaaggacaaacaaacaaacagaaaagcccaagaatatgtaaggttgtgcatggcctgtgaaacttaaaatatatacttctgcacatttgcagaaaaggcttaccagctcctgctttatactttgaaaagtgacagccaaagtaggaagtagcttgactttgttcctaccccatctctgaggaattgcattagcaatcttgataatttccagtaataccatgaatccagagaggtataggcagacggagcaataggcagctcagggaaaggtggagataaagcctgtgagtctaccactgctaggatcttagcacaggcagggaaggctcactatgtcccagagctccacattgaacagcaggaacaggctaatgcactgggatcccctgccatgaatatgggacacattcccaacagaggggggtgaactctcagaagagatcagcaagaaaggtggcacaaagttcaacaaagccccccttgcttccccctcctaaatcattacgttaccaaaaagtgcaaactgtagctggaaaggaaaaaatgggtcaaaattacattgggaaaagcgtattgacaagaattcatatatactgtgtcggaagaaataggtttggacagagcagccgttattatacatgagcaaggcaaagagacagcatagcagctgtgaagaaataacgtaggaagaaagaaagacatttaatatgcccagtaaaagacctcactgtagacaaaattataatctaaggaacaaatgaaaatttcccatgagtgtttcatgtttgataagaacattaatgaaatagctcaaaacaaaaagataaggctatgagagacaaattgatgactaacaatgttattaaactaatatataaaattgacactgctgaatgagaaattataaagaggaaaggcttgagataattgcagtgaatgcaaaagaacaaagcttaatacaattagaggggaagtaacagagatagagaacaaaggaaattcaacataattggttccatgaagtagaaaacccaaacatgaaaccagaaatggattcaaggatagaagaaaatctgttgaaataaactaaaggcactgtatgtgccaggaatgtcatgtctattgcacaagttattggggactctctaacattagtttacaatatttgtcttccctgctccccataccagttaggttagcagctggggatcaaaaagactaatcagcagttattttccatatactcctctgtgctagtaaggcttacttaggtatagagtagatacggaggggtttaaccacagcaaagcccttcagatgtgacccccagatactaacctaactggtatggggagaaaggaagacaagcattacgaggtaatgttagagaatctccaataacttatgcaatagacatgacattcctggtacatacagtgcctttagttagtggtggtgcattgtattatgtttaaagagattaagtgatttccctataagtgcatacaagtgtatagtcaatacctggtataggttttgaaatatacttattaaacataataaacttactatatgtgtattgaggtatacttattaaattgtgcatgtgtgtttgtgtgtgtatgtaacatcacacccatttgaatttaactccttaagcattttgagaattactcttacctcctcttcgtttttgtaatcctcacaacatagtgctgtgcgtatgaaaaatgctaaaggaagaactattacacaaaacttagttaaataagacaaatgtattaacttgctgcagaacaaacagtaattctccattgtatgacattttataattttaactgctgaaacaaatggaaataattattgtgaaacaatttctatcctataaaatttggaacttgaccaaagaaaaaatgttttttctgctttattctacttcgattgtaggtatttgtggaatcgatgaatttgataagatggggaatcaacatcaagccttgttggaagccatggagcagcaaagtattagtcttgctaaggctggtgtggtttgtagccttcctgcaagaacttccattattgctgctgcaaatccagttggaggacattacaataaagccaaaacagtttctgagaatttaaagtaagtctcttcaaatatttatacctttaatgtattgaatcactttaattcaataagaaaaagaaatagttcacagaactacaggggaaaaacatggatatttcacagaagttataaatgtccaataaatgcacaaaaatgtgcttaaacactgcagagtaaaacaatgaagtacgaatgagatccaccagattggcaaacattttaaatattaatcatttttggcaaagtagtgtggaaatggtttctcagtggctgggcgggtggcttatgcctgtaatcccagcactttgggaggctgaggcaggtggatcacctgaagtcaggagtttgagaacagcctggccaacatggcaaaaccccgtctttagtaaaaatacaaaaattagccaggcatgatggcagccgcctgtaatctcagctacttgggaggctgaggcaggagaattgcttgaacctgggaggtggaggttgcagtgagccgagattgtgccaccacactccagcctgggtgacagagtgagacgccatgtcaaaaaaaaaagaaaaagaaattgtttctcacatacacaatttattattttgtgggaccccttggtgtgttgatcacaattctaaatgcacattctgtttgttatagccactctacttttaggactactgttcacagaaatagtcatacaagtgcacaacgataggtttatagcatgggtattgcagcattattgctgccaaacattggaaacaccttaaaactataataagactgtagtgattatgagaacgaaagtggctttatatgtactaatgggggaacatgtctgtgctgtactattaagtgagaagagcacattaacaaacttaaatatgtggtatgatcctgcttttttcaaaaacaatgtttatatctgtatgtatgctttctcttctaattcattctgtacagcttggacaaaatgtgtggaaaaggaaaaatatatttaagtgatacaaaagtgagaaaaagacaaaagagtacctcctgaaaaattagagccttaagcctagtgggggtggagttaatttcttgttgtttaataatgtatcaatatagaaacagtctttgatacatagtgaaatacacaatgtgtacttggagatttagggtatttaccaccaccaccaaaaaaatcaacctactagtagtttttctttagtaaaatgacaaagtgctatattagaaaaatcagaaagatctattgaacaaaaatccagcagacttggattctgttttttaatggtatcatgaacaaaatactgaactagctaacctctgatatgtcatgtagcagtattgccaattagtgataataggacatgaagaattcagtgggtttgggggtgtgagaaagagccatgtcctcaacctacccagggtagatacatgtaattcttgtgcccatgttgcagtggttggatatatcgaatccaagaagctatttgcttatttctttaacctaaatcttggtttttcaagttctgcgtggaacttgagtagtaaataagtgagtagacagttttctagtttttccttttgattccaatcattgtttcttctttctttcatccttcatagaatggggagtgcactactatccagatttgatttggtctttatcctgttagatactccaaatgagcatcatgatcacttactctctgaacatgtgattgcaataagagctggaaagcagagaaccattagcagtgccacagtagctcgtatgaatagtcaagattcaaatacttccgtacttgaagtagtttctgagaagccattatcagaaagactaaaggtataaatgtttcttctccttattcagtttggttctgtttgaatgtcaaagttcagtgtgtggcttattgtagagcagtaggatwcaaactttttttttaccagaactttttaatatttccatactagagtttacgtaaacttcatctgaaataatccaagtcggcctggcgtggtggcttatgccggtaatcccagcactttgggaggccgaggcaggtggatcatgaggtcaagagatcgagaccatcctggccaacatgatgaaaccccatctctactaaaaatacaaaaattagctgggcatggtggtgcgtgtctgtaatcccagctacttgggaggctgaggcaggagaattgcttgaacctgggaggcggaggttgcagtgagctgagatctcaccactgcactccagcctgagtgacagagcgagactgtctcaaaaaaaaaaaaaaaaaggaatctaagtcagctaagatgagacctacagataaagtgtttggttgatttggagagtcttttagaattgtatatttatctaaacaagttatttatttattctgagacatagtctcactcttatcgctcaggctggagtgcagtggtgtgatcttggctcactgcaacctctgtctcccgggttcaagtgattctcctgcctcagtctcccaagtagctgggactccaggcacgtgccaccacgcccggctaatttttgtatttttggtagagatggggttttgctgtgttggccaggctagtcttgaactcctgacctcaggtgatgtgtcctccttggcctcccaaagcgcagggattacaggcgtgagccactgcacctggcctaaacaagttattttagcagaaatattttatttgctacttatccttgttatcttgggccttttaatcatgcttcaggtggttcctggagaaacaatagatcccattccccaccagctattgagaaagtacattggctatgctcggcagtatgtgtacccaaggctatccacagaagctgctcgagttcttcaagatttttaccttgagctccggaaacagagccagaggttaaatagctcaccaatcactaccaggcagctggaatctttgattcgtctgacagaggtttgtttctttttatggtcatgctttttttggcttaaaggggaagggtgtgccttgacttctcttttgaagtattttctgcataattgactccattttcctttctatagagagatgttagaaatggatggatgaaagttttttaaaagattttgtcatgtctataacatatccaagtatagctacttctttctagtcacagaatcaattacttagcatgcaacttttcttttgtttttctttgactgactcttaggagactcctggaatatctgaaaagtggttaggttaactaggagtatgagacccaagttgagtatatgggaacatggaatgtgtcaggtatcttgagtattttatttttttacatgacaggtccacaaggatagttcctgtgtttttaacagcagtaatatctattcacagtttgaaatactaagagaactctggcagtaaaaattagctagctcagagtttgggctttttgctcctaaaatctgattaattcttctttgttgttttaccatattggttaggtatgatttcctaaaagtaaaaggcaagggaaaaccaagtgtatttcatcatcaaatctcctgaaatgatcactcagaaatatacgttaacaagtaaaaatgaggtttatccttattttaagtgagttgtaattttcatagtcaaggtttcacagattttttttgtttgtttgccctgagtcagggtctccctctgtcacctaggctggagttcagtggcatgatcaagcctcattgcagcctctcctcccaggctcaagggatcctcccacctcagcttcccaagtagctgggactacaggcatacaccaccgcacccagctaatttgaaaatttttttgtagagacaggtcctcactttgttgctcaggctggtctcgaactcctgggctcaagtgatcctcccacctcagcctcccaaagtgctgggwttataggcgtgagccaccacccccagcccagagaattacttccatattttgacttttgatgttataaccttcctcgcctaaaggtcagtttttgtgtaaaacaagtaaatgaagtaaagcttagacatactatggtaaatatattcatctttcgtcatctgaaaatggtgttttcttttaaaggcacgagcaaggttggaattgagagaggaagcaaccaaagaagacgctgaggatatagtggaaattatgaaatataggtaagataaaaatttcaaattgttttaaatgaaataccagttatcttcccatctcaaattaggtaataggccaaggctacttttatttagcccattgggtcacttattttcctcctaaacagagtaccgtttcttagtttaaaatatttctcactgtgtaaataatctttacattagaaatttttttgaatgagtaatacatttacatagtgctaaaatcagttccaaaacctattggagaagagctatttaccacctactcgcccttcacccagacacccattgcttttccacagtctgctgtttatactcttctgtactggttttgaattttaacaatatatccagagatctttttttattagagactctttttttatagctagagtattctattgtgtagatatactatatagtatatttgatcagtcccctattgacacataaatattttccattcttgtgcttttaaataatgctacaatgagtaatgttctacgtaagatacttcatatgtgggtaagttgtgcacctacgtgataaattctcagaagygatatttctgggttcaacagtaaatactataggtttttgataaatattgctaaattgtatcctttgcattttacatcatttagtagataatgattcctagaaggtagaaaagaaaaattagttgagcatatatgtttaccttagacatagatttttaaaaatcagtaatattattttgggtagttttttttattccagataaaaaaatttttttaataggtccatactttcataagcttcaaaattccaaagttcaaaaagtataggccaggtatggtggctcacacctgtaatcccagcactttgggaggccgaggcaagtggatcacctgaggtcaggagttcgagaccagtctgggcaacatggtgaaaccccgtctctactaaaaatacaaaaaattagcygggcgtggtggctagtgcctgtaatctcagttacttgggaggctgaggcgggagatttgcttgaacctgggaggtggaggttgcagtgagctgagattgtgccactgtactctagcctgggtgacagagcaagactctgtctcaaaaaaaaaaaagtatatagtggaaaaagtttcctcctactcagcttaatagttaccccgttcttcctgctagccagtggcaattattagcagttttttgtgtgactacatatctatatattcttttttcccctttgtagacaaatggtaactataacaacataccatatacatgctataccttgcttttttcatttaaaatgcatttttaatatcctctgatagcaatgaaaatacattatctgttaggagtctacttttccaagaccaaaaaatatattgaagatgaaattatctaattttgttaagtaatttctaattcttctaaggtagatgaattcttttgtcctagtagctgctgattctgaggtttgcgtggtgtcagaaccaggtggttttgcccaggtggttttgcccagctattcccctttggctgtgaataaaagtgcagcatagctggaagagcaagggctttggagttcaacctggagctgccatggcaggttacacactgcttctcagtttcctctggtgtaaaacacaccacaaaggattgtgctctgaggtgtcatgcagtgatgctcaataaagtgacgaatacggttctgatacattagagaacactcagtaaacactgtttactatcaatagcgcaagtcttttttttttttttttgagacagtctggctctgtcgcccgggctggagtgcagtggtgtgatattggctcactgcagcctgcgccccctgggttcaagcaattctcctgcctgagcctcccatgtagctgggactacaggtgcatgccaccacacctgctaatttttgtatttttagtagagatggggtttcaccatgttggccaggatggtctcaaagtgctggccttaagtgatctgcctgccttgtcctcccaaagtgctgggattacaggcatgagccaccacgcctggcctgatagtgtaagttttgttgatactcagatgaggctgagcagatccccttttctctgagttataccataaaccaaaggcctcaaaaactggcagatctcaccctagataagaagtttccaaaatcacccttttcaaagaatttttatggtctagtcctcagtgctctccatctaaattgtgcagtatgtcttagctgcagatccttttcttcttgtcttttcctcatagggagagactttacctagttgtctctttgtccccagcctggtactgccccatccctggaggctgctgtcttctctctgctgcctctagaggtatgcagatgggtagaagggcacccatgtcacctcctgaaggtacaagaatctgcaggttgtttcctgcccttagagggagtccatggaagaagaggaacctttctccttaattcagtctcagagtttgtaagcaaccgtgaggttctactggctgtctttgaaagctttaaagattctagaattgacagctcttaattttttattggtggcaccaaagtaactgcctcataataagaaaaattaataattattgactcccaaccctttgagctaatttctaacaacttaccttctgtgtctaagtatcctattggtatggcatcacacagtgcttttttttttttctcttttatttagacagagtctcactctgtcatccaggctggagagtacagtggcgtgatctcagttcactgcaacctctgcctcctgggttcaagcgattctcctgcctcagcctcctgaatagctgggattacaggcacctgccaccacgcccagctaatttttttgtatttttggtagagacggggttttgccaagttggccaggctagtcttgaactcctgacctcaggtgatctgcccacgttggcctcccaaagtgctgggattacaggtgggagccaccgcgcctgacatcacacagtccttgacccatcaattttctctctttatgtgattcagtactagggtttgagggatcttgtagctgaaaattttaccaacctggctttagtccctctccagttgatctcattatgttggagaccctctagttgccatttataagcaaccagatagtctaggaatttactagactttctcatacaacttgctgctaggggcatggtgtgctagcatatgaagtaaaagaatggccacaaaatctagttgtctgcctgacttcttgtgggtatggctttctaagagaccagactagagactgacctagcagagatattttttcccattaggaaagtaagtcacaacccaaccaaaatttcagaattttttttaattttaactttttttcctataaaaaaaacaaagaccaaaaataggcacttcttatttaatgatgagaagttgcttgttgacttacagtctagaatgtgtgcatcttgctttctctgcatcctgcacttgaacactccacctttgggagtgtggctgagattcccactcctgatttctttttccttttaatgatctctggccctctgggtcttctggtgcctggctctcctgaatgtcatgtttctactttgtagactgttcatctgtcgagcaaactaaggggtacactaccctgctccttttctctcttaacctgtaacattctcctcttgaggctttaccattgctcaatttctgcaggccttagaccatagacgtcacctcaactgtttactgtttccccacagtaaattcactggtctgtggacacggtagattagttctcctatctgagcatcatgcttaagcagagtaaattaggctatatttaccttttcagtaaaaatgctatattgcccatttatggttggttatacttggtataagatttctctgcatgtctgaatactcatgttggacagtgtttgcatgtgctttcctgtccaagaggaactcttaagtgttgtctcatggaactctgtatttgtactgcttcccagagttgctttggtggtaaatttgaacaagtttcagatcagtttacatctgggcccctgaaaaaaagaggtcttattattaagtgtaaacagtacccacatgacattaccagattgtttccctgaattgtctcagtatgtttactggcattcataaaaattttcaggaaaaagaaaatagtttgattggaattacctgacactatgttcatggtagagatcaagatccagtgaaacacaatgaaattagattatgaattatctgtttgttatgctcaacatgcattctttccttagtttatgagagcagggaccttatctgactcatttaccagtatattcccagggcccagaatcatgcctgtcataaagtaggccttcagtaaatgtcctgcactgatagtaaagttgaccttagtaatgattcattcattcattaaatcttccatttcagagttttcatctcttcagcttcgttcagtctttgcccttaatgtggttttaaaccttttaagattacattttaactgggaagcygacagttgaataagaaaattcttaaactgtgacatagcttgtctgagttaccagagcacttagctgtattttaaaaaactaaatgcttatatttagtagacagttcacataagctttctcctaaaattgaaaacatactaggtagcagaagagaacagagccaccttcaaaggtgaaagatcattgtttttttctatttcaggaaactagctcaaatattttacatagctttttaaaatctgaagcagtgtagcagattcaaatctgagatatgccacttactagttgtgtaacttctggcaagtcactttaatcttagcataggttggtgcaaaagtagttgcagtttttgccataagaaaagcaatttcaaaaacctctattactcttgcaccaacctaataagaatgttttttcatccgtaaaatgggaataagaatagttcctaaatcacaggattgctgggaggattaagtgggatagcctatgttaaacaaatataattaagataaatgttacctattattattaactgaaagcatttttaacaactttctcatgagaaacaagcatatgggaggttcatcttaaaagagattatgctgtatttcagaggaaaacacttaccatcttactgttttatcatttttaatagttttatttgaatgactcattcctatttgcataacgtaggcttttaactattcaaggaacaaaaggaagctttattgtttataacccattaaaatcattcctgcagctcattaagggaagggattatacctgttttgttcaccactataagcctgttgcccagcaggtgaccagtatgtatttgactaattaattaattcctgattaaataacagttttgccaattagtctggctgtgaaatatagctatcccattgttgaggcagggaatcagcaataragttggattaaacaggatggttaattatgtttctaactagtgttttcagactttagctaaaattcactatcaagtacgtacttctttccttggtgatattgtgaaaattagagaaagcagaagaaatctggcagtaataggtgcatcctttaatatctaaccagtatcactgcaactcaccataacctttctagttcattcctagagtattttaaataccttttatttaaaatactggtgcggccagatgctgctccaggagatrggacacatttttatttagtgaagtctaaatttattatatttagaatttcttttcttcatgaatcaaaaagaatgtcccaggtatttatattgtagtttatcaattttgtgtttttatgcatttctctctccaaatttagaagtttcttaaaagcagtaactgtgtccaaaatatttttattccttatcaatccatcatagtgaatttcagagtggcccctcaataaacacatgttgaaatgtttgctaagtgagccttgtggctacttccaaatttttcttctgtaacctgaaagcccaggacaacaatttctatggcagtgctacattgggtaattttttcttcctttctttttaagcatgctaggaacttactctgatgaatttgggaacctagattttgagcgatcccagcatggttctggaatgagcaacaggtcaacagcgaaaagatttatttctgctctcaacaacgttgctgaaagaacttataataatatatttcaatttcatcaacttcggcagattgccaaagaactaaacattcaggtatgttaaactagttaatctcttttgtaataatttcaggaggtccttgttaatatatagtagaacagaaacagtttttacttatttaaaattcatacctgcttcttctcaaaggttttcagcatcttgatagtcagagggaaacattgtagtaagacagtctctatgtttttctgactgtctcttgtggatatgtcattttaacatcttttaacgttgcatccctcatctgttaaatggacatgattataccaattcctacttcaaagttctcgtgaaaatcaatgtaatagcacttcaaacatgggctgttacacattatggaaaattaacttcttaatttcaaaagttagcttgatttttttcagctaacctaaaacaaatgtaaaatattctctgcatattggaatttttactttttatttatttaggcattatagaatccagaactcaaatataggcagtttgctctgtaagaaataaaaataattttatttggccaagaaactttacaggtacatattattatttgagagatttattttaaaagtaatattttgacatgttacttaatgggctaaaccttttgatgttttcttccaggttgctgattttgaaaattttattggatcactaaatgaccagggttacctcttgaaaaaaggcccaaaagtttaccagcttcaaactatgtaaaaggacttcaccaagttagggcctcctgggtttattgcagattaaagccatctcagtgaagatatgcgtgcacgcacagacagacagacacacacacacacacacacacacacacacacacacacacacacagtcaaatactgttctctgaaaaatgatgtcccaaaagtattataataggaaaaaagcattaaatataataaactaatttaagaagtgataaagtctccagatgcagtagctcacactgtaatcacagtgactcaggaggctgaggtgagaggattccttgaggccagggttcgagaccaaccttgggcaacatagcaagaccccatttcttaaaaaaaaaaaaaaaaaatttaaacttagctgggtatggtggcacatgcctatagtctcagctacttgtgaggctgaggcaggaggattctttgagcccaggagtttgaggttacagtgagccacaatcacaccaatcactgcactccagcctgggcaataaagtaactcttgactcaaaaaaataaaaaaaattgtagtggtagccatgtgttaattgttaaataaattctccaaagggctaaaagtaaattacttataaattttttatagttgtatttttgacctgccttttatatgtatgaatatttcatagttttgcatatcagatgtaggcatacagacaaatacataaaccaatgaatatattacatattctgtgttccaataaaactttatttatggacactaaaatttgaatttcataaaattttcccatgtcaagaatacaaaatacttgagttttgtttttagctatttaataataggtctcatttattccacaggctgtagtttgtagtcttgcttgaaacaatagaaacagactgattaagcaggagaagttttttgaaagaattttgtttggctcacggaattatyagaaggcaggtgaaccaggagggtaagcttccagcagcaatttgtaaaaccatgccttagaattggactaaggaagaagctgctgacactccactgccacacagggcactggaagaaagtgctgctgcctccctgccccacctttgccacttctgcagcaggaataggtagaagaatgcccccacccgcaccggaacagcaacaaaaggattctgcatgagatgcctccctaaattgctgaattcaaaaaagaagttgcatacaaagacatctgattgaaaaagggtatgttatatgcccctttcataggctgctagggagttttcctggttctactttcaggtggtgggatcaataagaccagaatttctcatatgttgtgagaggattcaaatgttacagggttgccagccaaactatcaatcatgtataaatccaacaaacactttgtaacatacaagaactcaggaaatgtgaaccattgttggagaatctactaaaatacggcttcccgcaaacgaagatgaatggaaaatgtaaataaaaagaactggcagtgtatatcagatgtttaactataggaccagaactaagatgtggagactattgccatagaccacaatgtaaatttttaagtgaggaaggaaaaatcaggaatcaaaaggggccaggtgcagtggctcacatctataatcccagagctttgggagttcgaggcaggaggatcacttgaagccagttttgagaccagcctatgcaacacattgagaccctatctctacaaaaaatagattagctgggcacggtggtgcatgcctattgtcctacctactgtggaggctgaagtaggaaatcacttgagcccgagagtttgaggttacagtgagctatgattataccactgcactccagcctgggcaagagagcaagaccttgtctcttaaagaaaaaaaaaaaaaatggagaaagtagatagtagtataaatatagtgaartctttaaaagctaggagttaaaagatatttaaagcaaataactcaggcatggtggtgtgtgcctgtagtcccagccactaaggaggctgaggcaggagaatcacttgaacccgggaggcagaggttgcagtgagccaagatcgtaccactgcactccagcctgggcaacagagtgagactctttctccaaactaaataagagatatttaaagctgaaaaaaaatctattaatagaatttaaaacatttcacaaaagtcaacacataaataatatcaaccaaaataaagtggtagacagaagagaaaatatactaatttattgttcaaagaggaaaataagtctcaaaggttaaggctattatataaatttatttttaaaaagacataaacctacattttcagaagaagaagttccatgtttccttagattatgtatttagcatccattaatcacagggccaaactaacaacaaaagttgtttagctttcccttacaatccagcttttatgggtgtgcaaacatcacattacagtccctccaaccacaaaccccaacatatagtatttcacttcctgcccaatagtgggtgtccccacacctttcaaccactgtagcaacaaagctctggcctaggcttttcacttgcttctttactgcctgactgactttggtgtttcctcatgtggcctggtgtggcatggcacgccctcttgggagatgaaagtaatcttccataggcaattgtttctgtgtcaccattgctgattaaaacaaatcctaagtacaaatgtcagaacagaaacatgcaaagcaagaaaacattacatcatgaaagtttctttttttttcttttttcttttttttttttttttgagacagagttttgctctttttgctcaggctggagtacagtggcgcgatcttggttcaccgcaacctccgcctcctgggttcaagcgtttctcctgcctcagcctcccaagtagctgggattataggcatgtgccaccatggctaattttgtatttttagtagagacggggtttctccatgttggtgaggctggtttttaactcccgaactcaggtgattgcctgcctcggtctcccaaaaagtgccgggattacaggcgtgagccattgtgcccagccaaaagtttctttttcaagagatggtggtcttgccatgttgtccagtatggacttgaactactcagctcaagcagtcctcccacctcagcctcctgaatagctgagactacaggcatgcaccactacacctggctgcgagatgaaattttaagagatgggggtcttgttctgtcgcccaggctggagtgcagtgacatgatcaagccgtgatctcctgggctcaagcaatcctcctacctcagcctcctgagtagctggaactacaggaatgcaacaccatgcccagctaattttgatttttagtagagatgaggtcttcctttgttgcccaagctggtctcaaactccagggcttcctgagtagctgagactacaggtgtgagccaccatgcccagcctcctctcttttccaatattgtgttaagtaaattgtattggtggtaatcaacttgatcatttcatttttaggatagagatatcaaggtgagggtataactgaacgagaagaggaataaacaccaccctgtgattgatggatctttatagctctcctttgataaagaagggaaatatcgtacttacattagcatgttatagttgctgttgttatacagaagaatattaaacaatattcatatattgtttatgaatgcattgaattcataaacaatggtatggatattgactagccaaagaggtggataaatgtagatacaatgatacggtgatttggtattcagtgtccattctgctctcctagtgtgccttcctataatgcaggggctggaaggtgagaaaataaccacatttcccagactccctttgcaggtagatttccagatgtgaattgggttccactgatcagacacccatgtgtgagatttggaatgcagaactgaggagagagccatcttcctcttgcttgtgttctggtggcatgtgtggttgaggagacatttaatttccctgcagcagaattcttgcagtcagttgttgaggcaagtggcgtggtggatgcaaccctgattcttcacctttctcattattgtggggtagcagcgcctctggcaagccagacagacctgcagtgtttttctgggagttaattctggagacccagtatggaacccactcctagcccttgtgacaatattgcaagcatccagttccctgttttacagtccttttaaatgtggctagctacagtagtttgtgtttcctgcaactaatcactcatacatctgtatctaaagcactccacctgggtcatgtactatacttaaaattataaggcaatattaattcacaaaactacctactcgttttatttaaccctcagaagaactgaaaacaaaagctataccaggcttgctctagagcgtgggcttgggaatggaaaggcagagtgcacctattgaattccatcatcagtttttctataccatggagttacttaccatgtgtatacataacactgattaaaaattttaaaaaaaaggttaaaacaaaaactgagccagattctgacatttaaatcagaattattcttagtacatagacttgcaaagtcactgaataattcsttgggactacagactcttagtctttgcttctagaaatgtatagtaatttcaacatgtcatatatatagagagagtatatatgtgtatatatatacacacacacacacactatatagagtatatatatacactccatatacagtatatatactagtgtgtatatatatatacactagagtatacacactctagagtatacactctataaagtatatatattatatatactatatattatatatactatatactctacagtatatatatacactatagagtgtatatatatactatacagatatgtatagagtatatatactctatatatacactatatatagtctatatactctagagagtacagtatatatatatagtgtatatatactctatggagtgtatatatattctctttctctccatatatatatatatagtaatcagcttcctcaggttgaaacatctagatatattgaaaacactggatagtctgcaaactcctcttccttagagaatgtatattatctttagtattaaagtgactcttgtaagtcctgagaaacacctcggaacactgcattcacgtgtttgctaggcagaatagtacccaccctgcaagacatcacatcctaatgcccagaacctgtgaatgtgttaggttacatagcaaggggaaattaagatggctaatcaggtgaccttaaaatagggagatcatcttggattatctgcatgggtccaatataattagaaagaacctttaaagtggaagagggaggcagaagagagccagaggaagatgtgactacagaagaaggcacggatgcagcattgctggctttgcagatgagggaaggaggccttcagccaaggactgtgggtggctctagaatctttttttacatctcagtatgtatgccacagttaaggtttttgtttttttatttttgagatggagtttcgctctgtcatccatgctggagtgcaatggtgagatctcgactcactgcaacttccgccgccggggttcaagcaattctcctgtctcagcctgagtaactgagattacaggtgcgtgccatcatgcccggctaatttttgtatttttagtagagacgaggtttcaccatattgatcaggctggtctcgaactcctgacctcaggtgatccgcccacctcggcctcccaaagtgctaggattacaggtgtgagccactgtgcccagcctcacagttaaggtttttaaacaatctgatttaactgaataaaaaatgctcgcttgtgtggcgacatggtttttaaaaatgtaaacagagctgggcatggtggctcacatctgtaatctcagcactttgggaggccaaggcaagagaactgttgaaggtcaggagttggagaccaaccagcccagggaatatatagggagaccctatctcttaaaaaaaaaaaaaattacctgggcatggtggcatatgcctgtggttccagctactcaggaggctgaggcagtaggattgcttgagcccaggagtttgaggctgcactgagccgtgatcacaccactgcattccagactaggtacagagcgagtctatgtggagtgcaatgtctctaaaaaaaaaaaaatacccaaaatataaacagggactatgaggtatgtacaggaaattaatagctgaagaatattttaccatgttcaaaaactaaattcttcatgtggctgagagaagaaagaaaaaaatggtatgtttgtgttccatttgcargtattacataaacccattttaaatgaactaaaatgcctaggatttgggggggaaaaattatcttgtgctcgcatttgaaggttcttctcagaaataaactgtttaaagagaccacagtactggtttaattttttttctgcaggaccagagggaaacaggtggtttaccatttttggaaactctgtcacatgatctgaatagaaaggatagttggatgtaacgttaaagctttctgaaccagcaatccccaacctttttggcaacagggactggtttcaaggaagacagttttccacggacctggatgggggaatgtttcgggatgaaacttccacctcaagtcatcattagttagattctcataaggaacgcacaacttagattcttcgcatgtgcagttcacagtagggttcaccctcccatgagaatcgaatgcgctgctgacctggcaggaagcagagctcaggtggtgatgctcgcttgcctgccgctcgcctcctgctgtgtggcctggttcctaacaggccatggattggtactggtccacagcccaggggttggggacccctgtaacaaaaggaaaacaagattcttaaatctttacaggaaggaggaatggaatggaaaataaagctagttgtacactaaatgatgttaacaatccctttatcacctttaaaatatgagcagagaggaaagaaatattaaaaccaaccctttttactttcttatttgtagataatgcctgccttacgagaatgttatttmttttaaaggttccaaaacaaccatataaaaacttagtaatgacttaattgttcacatattctagtgacatcagtacattttcaggaagaaatgtggaaaggttggcactagaagttgacataagaattagtttagccaggtgcagtggcacatgcctgtagtcccagctacacaggaggctgaggcaggaggattgcttgaagccaggaattctgggctattatagtgtgctatgctgactgggtgtccacactaagttcggcatcaacatgttgatctgggagtggtggaccaccaggtttcctaaggagggatgaacctgcccaggccagaaatggagcaggtcaaaattcccgtcctggtcagtagtgggatcgccccgtgaaaagccacggcattctagcctgggcaacatagtaagaccctgtctcttacataaaaaataaaataacaaaaatgaaaaggagaattagtttagatctcttgataatttaaacagtaatctaaattatagagtttaggtggagttaatctctgcaagtcctgaggagctatgcccaaggtgcttggccctaccagcaatgcactcttttgcttacatgtgtttcaaatcttaaatcccatcatttagttttttcctatttaggctgtgggacggtgcgtttattacaatgattgaaacctgtgccttatttggattactggttattcaaaacacatctttgggtttagtgcctggtaattacagcttactcctgtaagatttaactgtcattgattcctagagaattttttttgagacaaggcctcggtgggtcacccaggctggatggagtgcaggggcacaatctcggctcactgcaacttctgcctccctgggctcaagcgatcttcccacttcagcctcctgagtagctggtaccacaggcacccaccatcatgcccaggtttatttttgtatttttggtagagatggcgggcggggggagccggggggtacggtgtgcggggcaggggggtgggggggtggtcctcacagtgcccaggctggtttcgaactcctgagttcaagcagtccacccacctcggcctcccaaagtgctgggattacaggtatcagccaccatatccagctgttttaatttgatttaacttccaatcaatatttacataagactcatttgcaaaactgccttctttacattatcttcttctggttttaggaaacaaaaagtagcccaagtttattgtgtcctagactaaataacacaagtaacactacattacactgcatatctgatataagaacgcagtacacatatttctagactttgttcatttatccccaggcagaaaatattcataatagatttggaataagattttcttctcaaaaagcttaaacttcaaatagaagtgataagtgagaaagaatgattgggttgcagaattttcaaaagcctaaaaacagcctgggcatggtggctcacacctgtaatcccagcactttgggaggccgaggtgggcagattacttgaggttgggagttccagaccagcctgaccaacatggtgaaatcctgtctctactaaaaacataggagttagcagggcgtggtggcatgcgcttgtaatcccagctgcttgggaggctgaggcaggagaatcgcttgaacctgggaggcggaagttgcaatgagccgagatagcgccattgcactctagcctgggcaagaacagggcgaggattcatctcaaaacaaaacaaaacaaaacaaaaaaacaaaaacagaaagcctaaaaacaggttccaagaagttgtagcaaagaggtaatttgttccaatatacagcacagtcatacacagcactttgcaacttaaccaaggaaaacattaaaagtggcaagacaatactaccctctaggggccaaatttttatgttcacaactcagcaaaggatcaatgaaaggatgaactaaacagttaataacaggccagttattcaagattgaacaatcctttctcttttcacgttctcttggggtaagcactacatgattgactacagaagttgggataagacacctgaccagtacattttggttacttatgaaaataattctgatacaagggtggagagagaaaaatttgaaatgaacttcatgaaacgtagaatttatatatagatttttatttatatttttattacagacttactattctaattttttccccatttgggaaaaaagttcagtgacagatattcccagtcccttcagacatatgaggtgcctgtgtgtttaatctacttggatagaaattattacagaattcataaaacaggaaatgaacattataaaccagttactaactgtagaatattttggtttcctctgycccctgccctgctctaaactctacttcactgggtttctgcattttctccatcctttatcccagattaacctgttcatttattgacttctgtcaagttctagaaaatgagatcaaagactgatagctggatgttctcccgtcttaaaatgttagggaaac

SEQ ID NO: 4 - DNA, 97300 bp, Homo sapiens
tgtgcttgtatcattgaccctttatgattagtcaattctctttatttattttttttgagaccaggtctcactctgtcacccaggctggagcatagtggtgtgatcatggctcactgcagtctcaacctcctgggctcaagcratctccctacctcagtctcccaagtagctgggactatagttgtgtgccaccatgccagggtaatttttttatttttattttttgtagagatgggtctcactatgttgcccaggctggtctttaactactgggttcaagtgatcatcctacctcagcctcccaaagtgctgggattacaggtgtgagccactgtacccagcctctttattctttaaaataagtttgttaaactgaatcaattaggttctgtgcttcctacttcttaccccagaatagtctatgattattgctttctacatgttctagttttatttataatgtgggggtttaaaatttttacttcttagaattttgggagtgccttgctgatgaccacatgtactgcttaaaggaggtgggatggggagaaggagaaatagatcagtaactagaaaaggagaaacatttagaaacaaagtatttgatgggttctgaactttttatgcaacttgaccacaaattcttaagttcatctggaagaaaaaatgcagaagtctagccaagaacatttkgaaaaagaacaatagtgaagaattttccctattagatrtcaaaatataccataaagctatagtggttaaaacattgtgggattggcacaagcatagacaaataattcagtggaactgaacagagactccagaaacagattcatctacatgtagaagtttagtatatgatgaatatggtatttcacmcttgatcttagccaaaagcctgagaagtaatgaatacggtatttgaaatgacagggcacaaagaggggaataagggtgaatattataatagatgatgttcttagttatctatctgggaaatgattggattagaattcctatctcacacatatacaaatgaaaataaattttcaaatggattacggaaggaatactaaagaacaamactaaaatgttttagaacaaaacatttgagagcagtttttcaatcttggagtgggaaagaccattctgagattctaaaattgagaagtcttaataagaaggggctggtagatttgactacataaactcgaaaacttttttgcaagttaagacaccataaaaacattaagaacacaaaagaaagtttttctgcatctctgccccctctctctggtgtctatctttctaagtctggcctctctcgagtccctgtcagcttgtctgagtctcggctcctcccggtgagtctcggcctctcccactctgagtcttggcacctcccactctctgagtctcggctcctcccactctgagtcttggctcctccctctctgggtctcagctcctccccctttgagtctcggctcctccttctctgagtctcagctcctctctctcagagactcttcctctttccctgtcttggctccttccttcctgagtttcagctcctagctctgagtctctgatcctccctctttggttttctccccagtcttgtctcctaccttttcactcaggttgtctcacaatctgtttcctcaagaaaagtagacgagtcctggacagacaaatgatgagtttcattcatagactgaggaagcaataaggaaaaaggaaaaaaaaaaagaaaacagcatgggaaagatttgcagtgtatatagaacaaaatatcaagattcataaggaatatatagtaagtataaatccatcaaaaaggtacaactggccaggcgcggtggctcacacctgtaattccagtactttggggggccgaggtggatggatcaacttgaggtcaggagttccaaaccagcctggccaacatggtgaaaccccatctctactaaaaatacaaaaattagccgggcgtggtggtacacgcctgtgatcccagctattcaggaggctgaggcaggagcatcacttgaacctgggaggcagaggttgcagtaagccaagatcacaccacttcacttcagcctgggtgacagagtgagactccgtctcaaaaacaaaaacaaaaaaaaaggcgcaactaccatgagaaaattggttaaaggatattcacaggcaattcaaagacactgaaatgtgtgcagcttagtaagtgctgtgatgcaccsggctccctccttcagagccgggtactccttctccaatgctgggagtctcagtagcctgtggttactccgtgagtctctctctaggagtcgtcatttattcagaacaaaagtatatcctagctgggcgtggtggctcacgcctgtaatcccacactttggggaggctgaggcgggcggatcacttgaggtcaggagttcaagaccagcctggccaacacggtgaaaccccgtctctactaaaaatacaaaaattagctgagcatggtggcrcatgcctgtagtcccagctacttgggaggctgaggcaggagaatcacatgaacctgggaggtgtagttgcagtgagccaagattgcgccactgcactccagcctcggcaacagagagagactctgtctcaaaaaaaaaaaaaaaaaaagaaaggatatcctgccattcctatgagagaagtcacagagaagtctgaaatacacaaaaaagtctttataattaagtggtcttcactttttttttttttttaaatacacagaattttgctcttattgcccaggctggagtgcaatgacacgatctcggctcatcgccacctctgtctcccgggttcaagtgattctcctgcctcagcctcctgagtagctgggattacaggcatgcgccaccatgcccagctagttttgtatttttagtagagacggggtttctccatgttagtcaggctggtttcgaactcctgacctcaggttatctgcctgcctcagcctcccaacacatttttataattataattgaaaatagtcttcacagtttcattataataatcatgtcaatttcctaagtttttaaaatttaatttaaattaaaaccttgaatttcctttagtttttaaaatttaaggacttaattctcttccacataaaaaagtggcccaatttcaaggacttcatgtctaaaacaccaaaagcaatggcaacaaaagccaaaatagacaaatgggatctaattaaactaaagagcttctgcacagcaaaagaaactaccatcagagtgaacaggcaacctacagaatgggagaaaatatttgcaacctactcatctgacaaagggctaatatccagaatctacaatgaactccaacaaatttacaagaaaaaaacaaacaatcccatcaaaaagtgggcgaaggacatgaacagacacttctcaaaagaagacatttatgcagccaaaaaacgcatgaaaaatgctcatcatcactggccatcagagaaatgcaagtcaaaaccacaatgagataccatctcacaccagttagaatggtgatcattaaaaagtcaggaaacaacaggtgctggggaggatgtggagaaataggaacacttttacactgttggtgggactgtaaactagttcaagcattgtggaaatcagtgtggcgattcctcagggatctagaactagaaataccatttgacccagccatcccattactgggtatatacccaaaggattataaatcatgctcctataaagacacatgcacacatatgtttatagcggcactattcacaatagcaaaggcttggagcctacccaaatgtccatcaatgatagactggattaagaaaatgtgtcacatatacaccatggaatactatgcagccataaaaaaggatgagttcatgtcctttgtagggacatggatgaagctggaaaccatcattctcagcaaactattacaaggacaaaaaaccaaacaccacatgttctcactcataggtgggaattgaacaatgagaacacatggacacaggaaggggaacatcacacaccggggcctgtggtggggtccgggggatgggagagggatagcattaggagatatacctaatgctaaatgacgagttaatgggtgcagcataccagcatggcacatgtatacatatgtaacaaacctgcaggtcgtgcacatgtactctaaaacttaaactataataataataaaatttgaaaaaaaaccaatttgcatttatgtagatgacatgttattgtctaaaccaaaccttttttggtatttgtttgcttttacgtcaggctttgaagttgctaagaaatttgctctgccctccctactctcctcgaaggagatgtgacctgttccctggattaccctaaggatccaccacccttcagtaaccgagggggccaagggccrggaaagcgggcagcaactgaattcctctctgggatctgactgtcctcagcagagagaaacaccacacggactggagcagagccacagttctgtgagctgtgagttcgtcagagagatgtccctgacaacaacagctgggtttgtgattgtgattyccctggcagctctgtgaatccatgtgctcatctttcctgacatgagcctctcccccttgcacaatgcaatggggtttttactatccacctggagcagttgaggtccagagaggccaaggaaataagcgagaaggacaacagcaggattcaaagccaaatgccacatagcgtacatgcctgaatgagggcatgggttccctaagaagccctcccttcctttatgctccacaggctcctgtgccattcccaattatgccccgttggaagtatcttggaattctttaactattcttgtacacagctctaacacctctgattgtcagggattcatgtatacctgtggagtctaaagggtgcagcaaagcagttaattttctcagcaaatcatccactggtccatatagcagcagccttagataggcaaatcggtgttccctttgccctctttgcctcccttatgaccccgtttctttgcactccctggcctcccctyggattcctactctgttatagagtgatagcatcacatcctgaggtcttcaggaattaacgtctttcaaaatagtcagaggagcatcataaaacaagtctttctcaatcccagcactttgggaggctaaggagggaggatcgcttgagcccaggagttcaagsctagtctgggcaacacaaggagatctcgtctcttaaaaaaatgtaaaaaattatctgggtgtggtggcatgtgcctgtggtcctagctattcaggaggctgaggtaggaggatggcttgagtccaagaggttgaggctgcagtgagttgtgacagcaccactgcastccagcatgggtgacagagcragactgtctcaaattctcacgccccaaaacccaagtcattctctttctaatattgattgccttccatagcttgtggtttttatgctaacagagtttctgccactctatggtgactatctagagacaaaccttcactacaagaatggtggggttatatgttgggaagaagtgggcaaggggaacaggaaacctcattatgctaccaccgctcctctcccaggtggcggaccccttgagggcagggatgtgtcagaatcccgcctgtccccacactaagcacagggtctgttgcaaggggaaagctcagtgaaccttggatgagtgaatgaaaatactcgggctgtaggaaatcagccctcaacgacatccctgaagcccgtgcctccttcatatgtgcaacccactttgtcccccacccactgcctctggtgtgactcactttcattcatccatttaccaacattaagaactatgttcactgactgtgctggagccctctggaggggccagacaaccccaacagttgcaacactgtcttccgctgctaggatggggtcgacacagggcacggtggggacgcagaggaaaagggctggatccagacacggcaattgggaaaagcttgaagttctttctagaagctgtaaagttccgggccagaggtagggacagggcgaggggagccagcagagagagagagctggcctgcagtggggccaacaaaaaatgtggccagccgctggccaggaaggggagtgagaagcctcaaatgaagctttgacattgtttttctttcttctggagtgctgccatgtgccgccacacagagcatctcacgggtagatgcgtattattgcaatgtgtttatctaggaaaccagagcccagctccagcatctggttttcagcacaatcctgagtgaagtccaattttccagttgggttaatgaaaataaaacttgggaagttgtgggctggctgcatcaggggctgaattctgggctcatgcagggccatggattgcagagccggaagggcttgggcaggtcatggatttattgtggacaaccttgcatgggsagggagttgctgcctggcctggctctgaggaacacgcctcacagaggaatgatgtctttggattttctctgtcttaacctgacaccagttgacggagcacctactttggctgaaacactgggctgcgttgtggggcaggggtgaagcacaggtgtggaccagtgcctgagcccagcttgctcgagcacagtgcagccaaggagagatgcccgaacacacaggcatcacacaggtggactgctgagtgggaccctgatagcttgtcagggctcaccactttgaagctgtctggagacctgggatccgagagagactcgtttttaaaagccagcttaaaaaaaggcgtagccaggtttcagggagacctggaaaccagaactaaaagtccactggctctctttgcatctccgtctgcaagtcttgagtatttgtttcatgtttctctctccttgcagaacaggtttctctgatcttcagacagtgtggcagaaaacgcaattgccctacagctcctgagtccacatgagcctctttatctctctctctttcttcccccactccaagttccttggggtaaaggtgctagttagctctggcaggtgacaggctcactattggtaaaatcagaggtggctagggggtcagagtcacatgtatgaatatggctaagaggagcccaccctgaggtcccatgcctgggggttcttgtttatagaaagtgtttagtagtgaactgcaagtcacagacagctgcttctttgatgtgactccacccttgtgagggagacaggacagggaaatgggggccagccattagtgtgagagtaaggctggacccagggctcctgactcccagcccagtgctctttccacactctgttccgctggtcctgatgtggagccaacagttttgaaatggactgtgcctatgtggtttcccctcgggagcagctgcagaacgagcagtgttgattaaataggattttgttggcaggccttggaacgagtggggagccaaacaccagtggtgtggctagctgcaacccttggggaggttatcagaaggcgtgtgtcatagatcctggacagggtgacctctcacagggtgtcaggatcctgggggaaggatgggcccttaccaaggatggtcttccttaccccaaggttgcttcctagacagaatgtagggaaggcccaggcagggcagggaggaagagcctctctctcctgagtctcacctcacactaaggaatcacactgagtcataaaatggtgttaggggaagaggcctttctctgaagctggagaggagggtccccaaggcaggccagagagccagttcctaaaggactataaggggtaggacatttggtgtctccttggtcatccgtaatcctgctgaacaatgacgctttccctcattccaccatcttggtgtgggaagggatacttatgtttttcaagatgctgtcagttttgtgtgcaccttgctgtccctgcagctgtctctccagcacctcatgcctggagtcactgatgttcccacttccaggcctgagcccatccgggagcctgagccaatactgaaaacagccccaatcccattccatggggcttggagtcatcttcctgctggtagcaccaggctgggcttcctgctttgctgtgttggtatatccataggactggggtctcgccttggtctttcttcctagttcacttggttatatttccttgaacccttcctgtgggtctctacccacgttttaagccttcctggggctctatacctgcttataaactttggcccattcctccagccactgatgaagggaaccctgggcatggtgatgaaccttcacctggcttcatgttacctcccatctctatcatctctgccaactggcctggctatctttaatagtgatgtcaactagggatgacctctgaacagtttaccagcccattttgcagctgggctggaacctgtggctcagggttagtgaggaggctttctccattttctttgttcttctccttggccctacattctttctccatgagcccattctaatgacacttggcatgggctatgcttcctgtcccactgagccatgcccaggagtcttctctcctttccatttgtctcccttctgttggttgcaaaggtcattaggagtccattgacagcagcccatcccccagtgagtagatctcctcatgtactggtaagggttactgactgcaagatcacattcctcatgtagacatctcccagagtattatgggtcatcccgcatcagctcatcaacccatgtgattaacctgagtcaaggcaactctggccaaagtgaagaaggagaaagtcagactatatatattctttattttttggttttaattctccctgtcatgatgcaggcaggtattacctgagcacatgcaagcctgacttatcctaatctctttctcatctaggtgctaaaatgacattttctctgaacttgggactatagaattcttgctagtgcagggtctgttctgttcagtcaccacccattcctcagacatggtttctattgccttttgcccacagctgaaattcccccatccatccatccatctatccatccacccatccatccacccatccagtcatctaataaatgtatctgccaagtcctgtgtaaacaactcaggcatggtttcttcctgcaaggagccttgtgtctgcctcaagccctgcctctgtctggcaggacctggactgtctccagctggacttgctaatatgtctccagtctaggctcattcttatggggatagcagacaatggcagggagactggcaataaacatgtaaacatataattaattgtcaactgctaattggcttaatgttatataaagaataagactgcaaaagaaaatgacaacaaattatgagggcacctacttaggaagggtattaggagtaggctttctgaggaagtgacctttaagctaagatctgaaggatgtcataggggaaaaaaatgtgcagagaacagaaaacaaaaagtgctaaggccctgaggtggagaaggaaacatgttccagaactggaaagaagcttgatgtggctgaagtwcagcaaatgagaaagtggcataaaatgagaccagggaagaaggcaggagacatattcatgcacagctttttggccttggtgaggaagttataaaaggaaagagctaaagcagaaattgatgtgatctgatttaaaagattgctctagctgctacgtggaaaatagattggagagggggtcacatggaagcaaggaactgctggtcttttagccaagggatgatgggtggcttaatttgatgggacagcactggagacaagtttggggtatagagtaggatgtggtgggcaagggagacttcatgtacttttgccacatttctgcttgagaaactgagtgaatagtgtaggggtgggttgcccctccacacctgtgggtgtttctcgtaaggtgggacgagagatttggaaaagaaaaagacacagagacaaagtatagagaaagaaataaggggacccggggaaccagcgttcagcatatggaggatcccgccagcctctgagttcccttagtatttattcatcatttgtgggtgtttctcgaagagggggatgtgtcagggtcacaagacaattgtggggagagggtcagcagacaaacacgtgaacaaaggtctttgcatcatagactatgtaaaggattaagtgctgtgcttttagatatgcatacacataaacatctcaatgctttacaaagcagtattgctgcccgcaggtcccacctccagccctaaggcggtttttccctatctcagtagatggagcatacaatcgggttttataccgagacattccattgcccagggacgggcaggagacagatgccttcctcttgtctcaactgcaagaggcatgccttcctcttatactaatcctcctcagcacagaccctttacgggtgtcgggctgggggacggtcaggtctttcccttcccacgaggccatatttcagactatcacatggggagaaaccttggacaatacctggctttcctaggcagaggtccctgcggccttccgcagtttttgtgtccctgggtacttgagattagggagtggtgatgactcttaaggagcatgctgccttcaagcatctgtttaacaaagcacatcttgcaccgcccttaatccatttaactctgagttgacacagcacatgtttcagagagcacagggttgggggtaaggttatagattaacagaatctcaaggcagaagaatttttcttagtacataacaaaatggagtctcctatgtctacttctttctacacagacacagtaacaatctgatctctcttgcttttccccacaaatagtggtgtctttaactgagatatgaagatcacaagcagagaagcttccgagttcagggaggaaatccagagttcggatttgagcatgttaagtttgagatctccgttagacatccacgaaggtcaggtaggcacttgaataaatgagactggaactcagaagaggcttgggctggagcgaaagctgaattgtcagcatatggagaataggtaaggtaggagggacaccctcttatctgtttccctgggagccttgcactaaagctaaggtctttcaaacagacttgagtaaaggcatcaggggtgggggacctggaatacccttccaatatgagggctcttgggttcctgcagggccaggactgtgcataatagtgattcaactggggcaggagaactttcttggctccactggggctggcctttcttaggattgttttaaattccattgattattctttgctttgctctggaaacaactactctttatgtaagccctctctgaaagtgacaaatcatggaaaaattcttttggatttgaatgcagtgaaggcagagagggcgcatcttgctttgtggtgtggaggccatgctgaggatgtgccgcgggccagagagctggaaagtgggttcaggcagccaggctgagtcaacccttcacccctgagaaacccacgcagagcatcacgtgatgtggaggaacaggggcactgagtcagtctaatattcaaggcaggaaaggtagaattggaaagggaggagaaaatgtcattttggtgtggcaggagaacacgacatgcttctctggctgccaggaagaatatttcctgcctagggctctggattctctatggctgagctctctgggatagagaaggagggagatgttcattcccatttggagatgtgggctgttttcttggggcatctgggctggtacttgtgaaaaggataggacttcgataggtacagttttccctttacctgctgaacccttctgcatgtcaaaaaaataaaataaaataaaataaaaaagttcccaacttgacctcagggacctccttccccctaccatggagattcctgctgccactcttcttggctttagaggacacacttgaggaagcagagtcttttctgatgagctccttgtccctgcttaccagatgtagtgattcctgagctccttcaggggtgaagtgtctcagcagttccttcctgaatcgtgcctctcctctcctctggctttctctctcagctctctcttcctttgtcatatttttatttcctcactttccctcccacagtggaatgaagcaccgtattgagtagaggctgttggtgttggccagagctgtagaatgctgatggaggaacaggaagtaagtgaggaaggggcaagggtgcttctaagtgctctgtgcactgacccagaaggtcctttttggagccacagggctgtggtcctgagcatgaaagaggagggctggggtgaggatcaacactccagagggccaggaaagggggagccactgtctccatgggacatttctggaagacagttttcgaggtggtatagtggcacgacagttattaagataatgatgaaaaaagattagaggaagcagcattgaaagcagcagcataaacttgtggagatgggggtcagtgtggccccgatggtcctcctccctccatcacccttctcccacccctaggtgtgtcaccctgaagctaaaactggtcctgtatggatgaggcaacataaatgggaggcaaggcagcagctgttgaaaattcaatcgcggaggcctctttggggcatatgtggcctaggagtggctggcacagaagtgctggaagtaaaaccacccctgcccctttcttttctctctacctcttatgagttttatggagttagtattcctcccctggacaaaaactccaaaggccttccgacttcctcagtaagatccaaagttcttctcatggacttaagaccctctatgacttggcctcccaccccttctcctggactctcttttgtgtactctattttggctgcactggcctccttgttcctggaagatgccagcgtgccatgccacgcggcttcacatctgctgggccctctgttgggacgctcttcttgcacagtgccgcctggctcactccctcactccttctaggcctccgttcagaggctcccttaacaaagaggctttctctacacaccccacatcaattagacactttcttcactcacactcccactcgccttaccatgattaatttttcttcgtagctctttatcatcaccacataacatattctgtatcaatctctttactgtctatctctctctgcctgaatgtcactgttttgtttgctgctgcattcccgatgcctagaagaatgtctggcacatgcaggctttcaataaatatttgttgagtgggtgaatgaatgactacatctgacgagaagagaggctttggtcactctttagcattgatatgtaatctgttgagtgcgtgtttgctgcatttatcaacattcttttaaaactagattcattttctgatagtattatctcatcagtcaggggaccgcctgagcattaggccacaagccaggctattcctggaaggattgcaggacaggcttgcaggatgatgcacaggctggtaccctggggctcttcatgtttgagaagagagccatggcacttctgggatgttcacagtgacctcactcttatttgattttccctggaagacacctcaggctacttccttctctgaggatgaagtagaggaaaggagtgtattattagtcagggctctctagagaaacagaaccagtaagatatctacccatccaccctattggatatatatcctatcgagtatatagatacacacatacatacaggaggaagagagggggaggggggaagcgagggagagagagggaaggagagagaaagagaatttgttttagggaactggctcacatgattgtggggttggctagtctgaaatttgtagggaaagctggcaggctggaaactcaggaaattcctatattgcagtcttaaggctgaattccttctgtttcaagaactctcagtctttgctcttaaggccttaaactgatgagctaaggcccacggcagtatggagtgtaatctgctttactcaaagtctactgattcaaatgttaattacatgccaaaatcaccttcacagcaatgtctagactggtgtttgattgaacaactggccaccatagcctagtgcatagaaataactatcccggggactcaccctggcagcaatatacatgctggtgaacagtccagtagctgcagtctcttagaattaggaggagctgccaaggtgccttatctcattcatgcctctggtggagtcctcctgtggcaagtcacaccagtgagcagtggggccccatcaggaaggactgggcgggggtgcccaagccccttattctgccttgttctggccctgccctggcctgatccttaccccaaacccatatccccggggccctgagtcatacctagtttttcccttttgtcacttcatttattctgagctccaggactaaaaagagagaaatcagtcccttttcacatggagcttacattccagttggaagtcagtcaatcatatgaacaaataaacaaaaatatttcagcccgtgataaatactatgaagaaaataagacaggacaatgggattggtaatgatggggtctcacctttctgaggaggtgccatttgaactgagaatgagggatgcgtgggaatcagtcatgcacagatctggggagcaggggggtcagcaagcgcaaaggccctgagcatgcaacttcttgggagccagaaagaaggccgtttgctaggcgcacagtgaaagagggagagtcacacgaggtgaggtcagagagaaagagaggggccaggtcgtgggggtcttgcaggtcatggttaggatcctgggacttgattctaatttcaaggaagctgttggaaagtctgtagtggtagaatgctataatctcacattttataaaaggtcactctggctgccatgtagtgaatggaccacacagggaaagagtggaagcaggatgccttgttggagatgtcacccaagccagagatgatggtggcttggagcggtgtgacaacagcgcagatgaagaaaatatacatttggtgcatttttggaggctaaaatgacaggcctttttgatgaattggatgtggcagatgaaggaaagaggaatgaaggaagattcctgggtttttatctaagcaatgtgttgaatggtgctttggttaactgagatgggagaagcaacagctggtggagggtgaaggtgggcaatcgggtttgtaatgcctcttaggtatgcagggatgtggtcaggcctggtcacctactgctgccagcttcaaagtggcagacctgagctgaaacctggacagggcgactttttcccagtggctgcctggaattcacttgctttcctttatcatcaagctcaccgttggatggtaaccccatgagctatacctgcggggagttctacctgagcttctcagctctccttgtatcttgagcccatggctcctctctctctgaggcagttcctgccttctgttgaattcagctcagttccacaagttcttatggacaccaactcagtttcagatccatgctggatgttggtagcacaaggaccagcaaggcatggctaggccagcttccacagttcctgcttgctctctggagcaggacttttaaaacctgggttcatggatggactgtgtattagtccgttctcatgccactataagggcatacccgagactgggtcatttataaaggaaagaggtttaattgactcatagttctgcagggctggggaggcctcaggaaacttacagttgtggcagaaagggaagcaaacacatccttctcttcacgtggcagtaacaaggagaagggccgagcaaaagggagaaaagctccctataaaaccatcagctctcatgagagctcactcattatcacaagaacagcatgggggaactgcccccatgattcarttatctccacctggtccctctcatgacacggggggattacagaaaccataattcaagatgagatttgatggggggaacacagccaaaccatatcagattgcaagggaaagatctgtaacttcccagacatgtggtataaaatttgtgtttaggtacattaatgtggtataaaatttgtgcttaggtacattatggtattcatttttctaggaaggggacctatggcttctaacagacactaaaaaaaggtaggtgacccccaaaatgccaagactgctattctgcgggtgaagcgcccaatgcttaatccctctccctccagtcttgagtcatcaccagcatccagcctttctcaaccttgcagctgcttcaggatgtgacagatgtgataaaatgcagggcaggtcgggataggccaagaagcaggaaggggctggatcttagggtgtgtgagggacaggtacagaatgcccctggagagagtgtggggggcttcaaatgccatctgaggagtctggatttacccctgcgaatgatagggagttagaaagcatcttaagcatgggtgacatggacaactttgtgtatcagatagtcctctctcatagttgggtggagcgtggacaggagatgggtaaggctggagagggagagtcaggaggaaagaatgggagatgagacagtgtggatttggagtggaaggaagaggaatggagggagtggaagctaaatgaccactgcctgttgctacagagagaggctattctggaaatgctgagcttggcagaagaggctttgggggctcaggggagaaaagaggggtagcttgttggccagagaagtggggagacacctgggttgaatgagggtctacaggaaggctccctggaagatggacagcctgactctgcagtgtggccaggcttctcttggaagacactctcctgaagtccttgtgggcaaatgatttgggatcagggaagagaggactgaaagtcagggaggccagagggtgcatggcggactgtaggcccctgcaggaggagaactgggagaggtcagaggctgagggcgtgcagagtctcaaaggtaggctaagcaaaagcagggaaatcaggggaaggatggaggctgagatcactaaggggcattccacaggaacagttgcttcctcagggtgaccatgcccagtgcctctgtatatgctcttccctggggctagaacactccatcctccttcccacacgtgcttggtgtcacgccccaggctctcgtccttctgtgacctcgagagcagagccagtcacttcctcctccctgctctcacagcccctgggcttgcctcctcaaagcactttgcaggctggattgctggtgactgtgtgtgcttgctacccccacccccaaccaggagactggacttcctgggggacaggcttgtctgtcatccatgggtcccctgagtctggtacagctgattgcagccctgctatggatattgaactgttaggtcctgagtgggacactcctgccagtgggtttacaaaggagccagtgtaggacataatttaaaaaagtgtttgccaatttattataaaggatattacaaagaatacagatgaacaacagccagatggatggaatagatacctaaggcaagagatgtgggaagaggcgaggggctccatgccctctctggatgcaccaccctccaggagccttcaggtgttcagctaccaggaagctccctcaaaccaaaccttttgtgtttttaaaaaggatggttagttgccttgaagtaggtggcgatgccttaactgcatgcatgctgtcaggttgcagggtctcttccgtcattgtcaaggggagtgctaactttccctcctttcttaaaacatgcaacatgatgttttaatgtacatatgtatgcataatgtacatatgtatgcataatgtacataggcaggaacttgctgtgcaactatcagtagtttctttctatccgtagccgaagcagttactatggccgaggaaactgacatatccattatctcacatagttacctttctttctttttttggtgagagtacctaaaatctacgctcttagcaaatttccagtatgcaatacaatattaactatagtcctcatgctgtccgttgaatctctagtcttattcatcctatacaactacatctttcaaccctttgacctacatctgtccagtccctcccatcaatcatcattcttctgtttttatgtattcaatttttttaagattcatgtgtaagtgaaatcatgcagtgtttttctttctttctgtgtctggtttattttactcagcataatgtccttcaggttcatctatgttgttacaaatggcaggattgctttcttttcaaggctgaataatatttctttgtgtgtgtttacatttatatataaatatatgtaacacacatatatatgtttatgtatacacaaagaaatatatatacacacatatatttatacatatacatcatgatttctttatccatttatctcttgatggacacttcggttgttttcatatcttggcagttttgaataatgctgcgatgaacatgggagtgcagctatctttacaaggtggtgatttcatttcctttaggtatatacccaatagtaggattgccagatcatacagtagttctatttgtaactttttgaggaacccccatactgttttccataatggttgtaccaatttacattctcaccaacattatacaagggttcccttttatctacagccttgccaatccttgttatctcttgtctttttgagaatagccagcctaacaggtatgaggtgatcactcattgtggttttgatttgcattgtggttttgatttatcttttattgtacctgtttgccactagtgtatctttctctacctttgttttccctcttctttctttcctgcctttttaacctcacctctcacttctcctgaaaagtcctttccagtcttctactctgttccaggaaagggtaatagaaagatccaaacaaatgatggcctcagacgtgctgggcccaagcagccccagacacccactgtggcctgatcttgccctgtggacccctctccgcagtacgtttaagctggaccagcctttagtgggcgtggtggggtgcttggacagtcgccccctgcctctaccataggagatctgggactgtctttggaaacctcaataatgcaggtgagaaaataggcacagagaggggaaagaagctgctgatagttgcaagttcctgggatgtcaggcttgctctgccactccgaggctgtgtgatctagtgctagcctcaacttagttttcacatctacgaaatgggcataacaagaggagaattaattgtgaaggtgttctgaaagttttttcacatctgtcactgataaacagtgggccgtacctaggacctaaatttcttgatttccagcctcatactttttgtatccatcaaatatgtttgatggagctaagggtgaactgttctagctgggatgtgcagccactctgggcacagaaagtcctcagccaaccactgtaaatgtgctgacttgactccacacagactttttactatatgctggagatccagtagagaggaaattgtgggcagcaaaaggaagtgaaaaattgctccctcaccctcagcaagggttcattattaattcaacaaatatttattgaggacctattatgtgtcagggtttgttccaggcactggagatacaatggtgagccagacagcaaagttcttgctctcatgaaaattctggatctttcttcacctctgatatcctgacttatcctgccctaaagtagtttcagcctccccaaaccaagggccagaaggcttcttcccctccaccctggatcccagtccctgctgtctctaaattacagctctgtttcctggggcaaagtgccaggctcagcaggaacactggcaaggcctttggaagccaaagataacacccctcatctccccgcaactcttccccaggagtcgtggtccccttctgctgagttctgggctttgtcagggatgggctgccctctgggggtctggctggactctcccagagcagctgagcttcaggcaggctccctctgccactcttctacctcacagagaattcagtcttactcgaaatccccagcctcaactttaggcactagctcgagccttcctaaaatttcccagtgtccacatttctaatgcccaggactctgcttttgctccaagctcagaagcccaggtctggagcctctgagaagtggctgacaatctccagggttcccaggctgccctgttgagatggaggcagcctgggctgatactagagccctaggatgggcacaggtaggcctggagtttggtcctgtttctgccacttgcttcctatgtgatatggggcaagtcactttccatctccgagctgaggttacttgtttgtgtgttcattcatccattcacgcatccagcaagccttttgactactcttcacctcctgttgggtcaagtctcagctccttgacacagtatctaaggcccttcacagtctgtaccatctaggaggaagctggatgagaggttttgtttcctgaatggctcttgttctgccctctgtcttaccagttcttcacatgcctcatctggaaccccagctggtctcctgtgccaggcaccctggcaggggcacactctgggcatctgagcacagggaagctctgtctttctctaggaattctggctgcctggtgctaacagacagggttttgaaagacgattttccagttcctgagttcaggcctaaacttggaggtggaagagagggcaccgaggagtaggttatttcaagaaccagggagggccagctggccaacaggctcagagaggtagcctctgggtggacagcccagggaaaaaaaaagatgggaggacaaagggttctgtagaagctgagacctggaagtggacatgggcaggttggtttgactcagaaattgggacttgaggttgctgctgccttggtggccagactttagaggagagcacagcttggatgtgttgggaatgtatcctgttccatcactatgattgtggtgattagttcagggatgggtacatggcccaagagtggtctttctgagtgaattccaggaattgatcctgagcattggggaagagacttgttcttttcccattggacatgtatgtgggaagatgaagcttggaattgctggtagccatttttccatagatgtaaagtctgagattgaagccaacagagacagagcagagcagaggtacagctagactgggcaatgtcattctttgagcctagtgtaaagctttgcctgaagctggctgtccctggtcttttttagtttcatgtgcccttttttgcttaagccagttagaatttttaaaaaatcacttgcaaccagaagagtcctacctgacacataaccgatgataaaattcgtcttcagaaagatcaatgtgataggggaagagccctcaagaaatcatcagacctcagtcccacaggaactcggtggagctcaattgttgatgactgccatcttgtgtgggatctaatgggggccccactgatctagagaccaacagcctgggggcccaagacagctgctctttgattccaaatgaggtatgaacagaacctgtccacctggacaccgaggcacctgccttgttgtgccacatgtatctgtgactaagaggagatttggctggttactgcctagctctgtagcccagtcagctcacatagtccagggaaaagggattagttagacatcaggactgggacttggaaaacccatctggggtggagggtgcttctgaaaggggtctacttagaaataaaggcgagagaaatcctgtgtccctctgatgtccatcatagccgtacaagctgccactcctggatatgacttaaccttttgacagctcttccccaaatggacttctgggtctctacttggacaaaagagggctaggcagagaattcagggcttttggcctgcagaggttgaaaatgtagcagagcagaatgaagattaaacggaactgaacactggaacgtagtacaattgtcccttgatttccgtgggggattggttccaggacctcccacagatacccaaatctgaggatgctcaagtccctggtataaaatggcacagtatttgcatataacctatgcacatcctctgtatactttaatcatctctcaattacagtcatgtgccacacaatgatgattaagtcgatgatgggctacatatacaatggggtcccctgagattaaaatggagctgaaaaattactattgcctagtgacatcgtagccctcataaaatcatagtgcaatgcatcatttacatgttgtgatgataaacaaccattcacattgtttctggtgtaaacaaacctactgcactgccagttgcacaaaagtatagcacatacaattatgtgcagtgcataatacttgacaagataataaatgactatgttactggtttgtgtgtttactatattatactatactttttatcattagagtgtactccttctacttataaaaaattgttaactgtaaaatagcctcaggaggtcctccaggaggtattccagaagaggacactgttaggataggagatgacagctccatgcatgttactgcccctgaagatcttccagtgggacaagatgtggaggtggaagacagtgatatggatgatcctgaccctgtgcaggcctaggctaatgtgtgtgtttgtgtcttcgtttttaacaaaaaagtttaaagttttaaaattttaaagagtaaaaaaaaagtttataaaaaatagatgaaagctcatagaataggatataaagaatttttgtacagctatactatgtgtttcaagctaaatgttattacaaaagagtcacaatttgcaaaaattaacaagtttacaaagtaaaaaagttacagtaagttaaggttaatctattattgaagaaagaaaaaacgtttaaaacaaatgtagtgtggcctcattgtacagtatttatgaagtctacgatagtgcgcagtgatgtcctaggccttcacattcacttactgatcactcactgactcacccagagcaacttccagtcctgcaagctccatttgttcattttttagtcttttatactgtatttttactgtatcttttctttgtttacatatgtttaaatacacaaatccttactattgtgttacagttgcctacaatattcagtatagaacatgctgtagaggtttgtagcccaggagcgacaggctatcccatatagcctaggtatgtggtaggctatacaatctaggtttatgtgagtacactctgtggtgtttgcacaaccaaatcacctaaagacacatctctcagaccatatccccattgttaatggatgcttaactgtactgataatacctaataaaatgtaaatactatgtaaatagttgttatactctatttcttggcagtaatgaagagaataaaagtctttatatgtttaggatggatgccactttttttttcgaatattttccatccacacttggttgcatccatggctatggaactcttggagatggagggccaactatatatagaattgtagttagtggccgggcttggtggctcatgcctgtaatctcagcactttgggaggccaaggcgggtggatcacttgaggtcaggagttcgagaccagcctgaccaaaatggtgaaaccttgtctctacaaaaaatacaaaaattaattgggcatggtggtgggcacctgtaatcccagctacttgggaggctgaggcaggagaatcgcttgaacctggaaggtggaggttgcagtgagccaagatctcaccattgcattctagccagggtgaaaagagtgaaactccatctcaaaaaaaaaaaaaaaaaaaaaaaaatagattgttgtttgctggatttctactcaatagaacagaaattacctcaatagtaaatattctatagttctcatttcagatgaaaattcagctgttctcaacgacttttttgttgtttgcataggtgatcctcaactttgatatgttctaattttcatgcatgtatctttcacttctgtgactgtatactgataactcaaacagatacttcatcctttagttgatgggtggtgattttaccttccctcttgtgtgaccacttgctaagtgctgctgcttggggataaaaggctgggtttctacagagacaaggggtatgggaagcgtttatggtacagctgcccccctttccctctgtgtgccaagggaatcccaaattttctgaatgcctggagtttgtcggttgataacaaattgttgtacaatgaacaattaggtgtttgcttcccaggcccatgctcccctctccaccactacagtccttgcatctggtaagggtgggaagggggttcagtggccactggtcctaggtgatggcaagggtggtgtcactggctggggatggtggagactttgccgtgccacaggggtggagaagatgagggcagagaggagaggtggaatcatggaagagaagccacaggctcgacctcccaggcaccagggagcaacagagggatgcttgtgaaagtttttatctgtcaggacccaagatagctataatgcatgtgacagggatggcaattttgcaaatataaaacagatatatttaattactcattacatcactgttttccctctgagatccagctacaaaaattatcactagagggcaggagaggtctctttagcaagaaacatgcgtcctagcccagggtactggcttctcccatagtgtgggggcagtgctgactaatgcttccctgttcacaacacgcttagaaagtgagaatatgcgtgtggcacactggggtcagctaaaggggatttgggaatgcctacatgggagctagtgaaaaaaattcacattttcttcatgttatattattacaataatatacaaaacaaaatattaaatgttgaatttatataatattctaaagaaaatcatttaaatattttattgttaaacatgagcttgcttcaaattaacatgtcttttttatgtagttttaggcttgaaatggctacatggaatttctgatcaagatttttaagggtttcttcattcttttttcaaatttcatttgtttctaatttttaaatgtttatagatttagtgggtacaagtgccattttgttacatggatatattgcaaagtggtgaagtctgggcttttcctgtaactatcacttgaatagtgtacattgtacccataatcatcattaacaggaaatttgtttgtacagattggtgataaaaagttaaaaacaattttgcacctgttaaaaaatatataccagttgaaatcatatagagactataacggcattttcttttttcaaacaacaaatgtggtattgaaattttttgggatgagcattggatttagcacccttcaaaccttttggattctagtgcacttaggtaatggtgaagccctaatctgcagaatacacatgcaattttacatcagatatcctgcaggcagtgtggaggtgactaaagaggctcatctactgagaaagacaggaacagcccatatacatcgagtgactgttgtcctgatttgtcctgaagggctctgattcattcttctgacatgacatgactatccagagcacttccctttgctaaaaaacaaacaagaagcgtgccagtttggtgttcatacacagtgtggatgaatctcgaaacattgcccagaatgaaagaagccagacacaaaaaagtacatgctgtatgattccatttatttgaaattctagaataggcaaaactaatttgtagtgatggaagacagatgagtagttgtctcaggcagtggtgggggtgagtgactgcagtggggcatatggggcatttggggggtaatgacaacattgtgtatcttgatcatggtagtggtgacactggtggatcacccatgtatacatttgcagaaactcatagtactatatagttaaaatagatgcatttcattatatgtaaattatacctcattaaagtcgatttaaaaaaagaaagtatactattttggacaatgaattttatggtttctgtacataggcgtgaagacagattcagggctgccatttctactgtggctgccagaagctccctcctgctctccttgcccccggccccatccctcttggtctgtgctctgtgctcacccgacgcaagggacacacactcctccagtgggtttctggctctgtccatgtgggagtggcacactatgcagcaagctgccaaaggacgtgtcctcgccgcttgggatgagatcactgtccttgctgtttgatggggcccactcttggctgccctccaaggagctgtaggtgaggttctccttagaggtacccagcctgtgcactttggctgccctctcacctgaggaccgagggcatcaccattgtgctgcatgcctgtggcccatctgaagcacttccacggggaagctctggcctagggaaggtacctgtgcctgtccctaaggctttctcatgaggctagagtagaaagggggaggatctgacataaaggaagcaaataagcacccatttcttggtcccagggaattgtgggaggaagaaggagggaggacaggagatggtggagagtggagggcagtggcgggggcagtgcaaggagaaatggagcgggatgggaagagaagttgagagtggtcagccagatgggtcttaaattccctttctgggctttggtctagagcaagtgttggcgaactattctgtaaagggctagatagtaaatgtctgaggttcgtaggatcatatggtgtctgtcacaactactcgactctgccattgcagtggaaaagcagccaaggacaatgggtaaatgaataaatgtggtcatgttccaagaaaacttaatttatgggtggcaaaattggaattcatgtaattttcatgtgtcacaaaatattcttctttagatttttttctcaaccattaaaaatgtaaagacaatttttttttttttttgagacagagttttgctctgttgcccaggctggagcacagtgacatgatttcagctcactgcaacctctgcctcccaggttcaagcaattctcctgcctcagcctcctgagtagttgggattacaggcacacaccaccacacctggctaatttttgtatttttagtagagacggggtttttaggctgggagccactgcgcccggcctaaaaaatgtagacaattcttagctcatcttcctcataaagtgggtggtgggcctaattcggctgttggggcatcgcttgccaactcatgtatttagtgtggggggtcctgagggtggaggacttagggaaaggtgtggctcttggaattctgagtgtcagcatagctgctcccttccctcactccctctgcccttctccattcaccaggcatcttatctgtgtaacccacagattgtaattatgggttctcaggcctgcaccccaacccaggggctgtgccatgctgtgtgtgcttcatagctgcccctcctggacctagtgcagggctgggcccagagtgggccttgataacatttgttgtctggaattaaatcagcagctcactagtggaatctgcccaggcctggctagaaactgggagctgtagccagtccctcctgccctgtcctcaggggccctcagccaccgaggatgcctgcctgttgctacgctggagaacattttgtcatgtttactaacaaggaatccgaggggtggagtgggatggggaccaaggagggtgttctgtaacaccacagggcagagagggatggagatggactcagggacaaggtcaggttacagaaatggactttggcaggagcattgacatggggcaggggcagagacagcaggaagcagagggcagggggagtgagatgtgggtttcctgtggggccctcccttcctgggcaggatggagagaagctagatgcctcccatgcctcccagggagagctatgcccaacaggcatgtgagagctcccttggcatccctggggactgatcacagagcaccggagactcaaactcacaactctcctgggttcttataagaaggaatttcaactctcagattttgtctgctgtgggtggcaaaggataattgctttgggaaagggcaattttgggtggaaggaaggggatctccctgggccccagtgttttgtggattgtgtgaggcacctgcaaggtcttggagaaatggtgggctggacaacaacagcgaggccctggcctaagctgacactgctgcttgagtctttaatgcatgtattcttttcttcacaaaggacattaaaaggagaccttttagcatcaggttatatgaaggacaaacaaagttaggacaaatatgggtcatcttcctggagcatcaatttgacgtgaacattggtggggaatagcacccccacctatgtttatattaaaacaaatatacatataggagtaaaatactgaatttgcatagatatatatttaaggaaatagggagcctggagagaaatttccagttttagaggcatatttaggcgatgctctcagacccttggaattcgtgttctttcttctgcccttagcactgtcactttgtctctattttacgaatgagaaaaacaaggtctggaggggtgcgtcagcaacttgcctatgtgataacacagaacaaggaggtaagggtaggactggaacccacattgctgggctctgcattcagcatgttacctgctacacaatagtgaatctagagtttcatgctttagtattttgatttcagtagtgccatggaaataaccaaatctcacctgtccaagtcgtctttgggcacagccccatgtttcaaatcaatcaagtctagtgggaggcaatgtggggtagtggagttaggggctgaaagtcaagagactggagtttacctttaaccagttctttagataataaagctccgtgactttaggcaaatggcttaacgcctccgggtttaccttccctatctgtaacatgtggtagctacacaagatattgcctaacagcctggccttctatgatgtgggaccactgcttgcctttctagaaccttcagacctgtagatgggctcttcttgracattctggagtccctgggggaaagggaagtctgmagctcagttggccacctctgcataacaaataccgagagcactgcaagtggagcttggacaaggtctggaaaatcagccttcttctggatgcctccagcctttgctatcatctgcctaggaggttggaagttactcaagcggctcaaggaaaaggtattgtgagcatgcaccaggtcatgtgattggaagggctatctgctcctggcctgaggccagcacccaaagctgtccacatctcccagggacagcagcatctttcttctttactacattctctctcctctcatcttgattggcttcctctgcctgtacatggctaactttgctaccagccagagtgggagtaacccacagcccctaagtcccctccagagagggctgtcaacagggctggctgctgagctggggaaggtgggagggtctcaccatcccatatgtagatttcacttaatttccctgctttcaggacagtgcttcacctttaacttcctctttgccaggtatcgcttatccttgagtgtctctggatcagtttctctggagatgaaattatctatggcctaccaggatagtttccaggcagtgcagagttgggaggaggactggggtagaaacactttcttataaagacttctgccctatccacctgttttcagccccatttttcaccctggctccaatgcatgaggctttgtggggtcggtggtcggaatttgcttgcttcttgctaacatttctctttgcattcactttggtttcagctctctctgctttgctaagctggttatcatccagcttcttacctcttccaataattattgacttctcttgtcctctgtcatgttcatgccattctctttgctcttgtgggctcactctttttcttttttaacaaaatttcattacttttactttagtgggtgtcaggatggaatggacataccacatgtgtttacacccccatgtttcattagaaatcctagtcactgttcaacacattctctcagctccatcagtcctttgaagctgttcttgtcaaggacaccaccatttccatgttgccaaatctcttggtcactttgctgtctgtcttcataatactcagtctctcagcagcattccacacacttgaccactcttgaaaaacttgcttcttttgaccttcatgataacacatgcttctgatttgtctgctacatccactgagcatgcttcaccctctcttgctatatcttcctcttctgggaattcccatggactctttctttggtcctcttcttttctctatctatacactttccctagctgatctcatctagtcctagggctttaaatactttctatataccaatgactctcacatatttatctgcagccttgatagcttccctgaatctcaactatctacttctcccagacatctccatttggatgcctaatagcatcttaaacttaactgggcaaacctgaactcttgattttcaccgccaaaccagttccttcttagtatttcccatcaaagtcatgctcatacactgagtggctgaaggccaaaactcaggatcatgcttcactctgctcttcctttctcctttcccatttactatgtcagcaagccctgtcggtgcctccatgatatatgattagtgagtctgcttctccattgccactgctgactgactgctcctgtcaaggccaccatcatgtgttgcctgggctattccagttgactcctgagtggtttcctggcttccactatggccctccaaggatccaccttccgcatagtagccaaatgattccattaaacatgtctatcaggttatgccactcctttgtttaaaattttccagtgatttcctgttgccttaaaataaatttcacacttcttaccaaggcctctgctcctctgcaaactctttctcttctttttagagatgaggtcttactattgcccagggtggggtgcagcagcttcatcatgtttcactgcagcctcaaactcccaggccctgtctcagcctcccaagtaactaagtcaacaggcataccccacctcacctggctaattttttttaaaaaagagatttggtcttactatgttgcccaggctggtcttgaactcctggcctcccaaagtgctgggattatgggtgtgagccactgtgcccagcctaaactccttttttttttttttttacacaggcttaatccactatggcctttctggtcatctcccattcctaccccaggacctttatacttgttcttccttctgcccaagaaggaagactgcagccacaatcttgatgcttactgcagccacaactcctcatcattcaggtgcaagctcatacattctcagagaggctctcttagtctattttatctaaagtaggaaccccttctcccaaatcatttgctagaacagtggtcccccaccttttcggcaccagggactggtttcatggaagacaatttttccaggaatggttttgggatgaaactgttccacctcagatcatcagggattagattctcataaggagcgtacaacctagattcttccatgtgcagttcacaatagggttcgcgctcctatgagtatctaatgccaccactgatctgacaggaggtggagctctggtgctaatgtgagcgatgaggagaggctgtaaatacagaggaagcttcacttgcttgctggcccacagctcacctcctgctgtgccacccagttcctaacaggccatggacaggtactggttcatggccctggggacccgtgctctagaacatcactttgttttgcttgtcttaaaaaattcatagtaggtatcattatccaaaattattttatttgtttacttgcataccagctaactctccccattaaaaaatggactctatgagaaagggtccttgtctgcattgctcatttttcatatctttatctaccacagtgcttggaatacaataggtgctcaatacatacatgtacaataaatgaatgaatgaccagttaagctaaagggactaggagtagagacagtccctggagagggggatgtgggtagaacaggcattccacagcgtgtctcttgaacttttgcttcattctaggccagagtatgacacaaagtctcctaattttataaagggtcagtaagcacaaattgaagggaaaggtgagggcaggggcagtggatgtggggagcgtgggacagctcaggaaaggtgcagtacgtgttgctctgcaaagattttgctccattcttttgtcccaagccgcacagcttttccattgtgacattctgtaactttctggaaattttttttttatggcccttgggtaattttccacgtggtcagccagctccgtcaagtgcaatggtgaggagtgggactcagaatggctgggaggccccgagaccatcagacagggaagatgcatgtcgtttgcacccggcactgacttccagctcccttttgcgtaggaggctcctggactgtgacatacaggatgttcctgtgtggctctttttaaggaagcctatttttcctccatgttaaaactaaaatctgtggtctagctcggagcagatgttaagagcacattctctctaagagtgtgggctggagtgtgggcaatggctatttatcaccgtttccttttctttgtgtttctctgtggttattgaagtttttggtttggggaaaaacaacaaaaacaaaaatagcaacatatttatgaacaaagaagagagctaaaacttaacatctggaagagaggaaagaggggagtaaggtgcctgaaaataatttcctttaggagtgactggaggcttcagggggatcacagcactcctgtggaatttttacagaactaaggaaggctggagtcagccaaacttttgaaacctcagcatcctaaacctcaactcttgctgccctgagaagagcatgagccggccaagccctggtggcggcttccccaggacctcccacttccttcctgatgtgcctgcagtcctggagctgtgatcgcctcttctttagcttcttagaaaagaggcggcacaagaaaaacgctcagtcatcttgcagagacttggcatctctcagcaacacgttctctctttctctcttttcttttttcctttgagatggggtctcgttctgccgccaggctggagtgcagtggtgtgatctcggctcacggcaacctctgcctcctgggttcaagcgattctcctgcctcagcctccggagtagctgggactacaggcgcacaccaccatgcctagctaagttttgtatttttggtagagacggggtttcaccatgttggccaggatggcctcgatctcttgaccttgtaatccacccgcctcggcctcccaaagtgttgggattacaggcgtgagccaccacgcccggccgacacattcttattaacttgatggcacagttggctggcaggttcccaggtcatgttctcagtgattggagttcttgctgtttcttggactccttcatgtctcacccagtcctaagtcccttccttgcttcttaattaatttatgtccttgtgtaatatgtggcacacccacatagccatgaggcatgttcaggctgtgttttttaatgttctggcttgttctacatttgccaagtgggcaaggacagcagttacctgattggctccatttgggcagcagaacctaaacagtgactacctgttggaatccacctggcctaggtatcttttgtttgtttgtttaaataacaacaagcatttcttatggtgttttgttttctcctgaactctgtaaagacaatggcaacacagaggtcagtctagaatgactatactggcactaggagatgagaactatacaagtggaattaagcaaatgtatagacacaaaatcatcacaaaaagggtgaagtgctgttcagttattgatgccagtccctcttctctaggggactgtgacagctgtagccagatgtgtccaggagattatctctgtcctgattctgtcagcatcctcttcatttattgtctggttttgcttctaagtcttcttctgcatctcaagctgtctgcatgccatactgtctgcattgaaatgatttgcttgcttaaaatgagtcttggccaggtgcagtggctcacgcctgtaatcccagcacttcggaggccaaggactcctgaggtcaagagttcgagagaagcctggccaacatggtgaaacctcatctctactaaaaatacaaaattagccaagtgtggtggcacatacctgtaatcccagctgagacaggagaatcgcttgaacccgggaggcagaggctgccgtgagccgaggtgccactgcacttcagcctgggcaagacagagggagactctgtctcaaaaaaaaaatgggtcttaatatcaatagtggggaattctcagtctctccatcagcaggtgctgaaagctcacaataaaggagaaaattttcaatagctgtttttttttttaagagatggggtcttgttctgttacccaggccagatgcagtagtgtggtgatcatggctcactgcagcttcaacctccctgggtcaagtgatcttcccgcgtcagcctcccaagtagctaggactacaggtgtgtgccaccagacccaggtgatttttaatattttatagacatcttgctatgttgctcaggctggtctcaaactcctggactcaagcaatcccgccatcttagcctcctgagttgctgggattataggcgtgagccactgctcccggcccagtagtcatgtttttgaggaagtttatttttatccagtatgtttggctctgcatgggttccttaagatactagggactgtctttgggtcacaaagccagcatgacactaacatgggtctcaatatcctttgcttgatagctttggacctgaacatcacctgacagctccacacactgtgttctggcttgttcctaatcctgccagttcctgacctgccattgttccatgtttggcttcaccttgtcttttgcacctgacatttggtccgtgctgctggctctattccacctatggcaacctgaataaaaactctctttccagccttgtttctaaagctcttccttggcccagatccccctaggtggcttctaccagccttgtccagttgaggagcatggcctagacacctgtgagggtctctgcctgcctccagctgtgcccaggattggcttctcctcagctgtgcctcatgctgggccacatcatgggagcaggctggtcagcaggggtggatgctgacctacaaagggctccttactgccaaaagtcattgattccccatccttctggtctaccattaaacatctgtagccacttagggttttgacttttaactatttcttgaccacatacctccattaccctccagagagcacccttttagaaataaatgtaatagttactacatttgttcaatgatttacagtcaacagagcactttagtatattcacatgtattatctcatttccatactttctttttttaagcaaacataaaataattttatcagatacaacaaaaattaaaacataacaaaagtatcacatataatgttatattcccatttaaatataacatagaaaaatactacaaaataagaaatacaaaaccaaaacctagataagattttatttattatgatgggtgtgcttgcctgttcataagttcattccagtctggaacacaggaagataatgctacccacatagctgctgcaccatttgatccattcctttctgttgcttttaactgagttaagatagaaaaccctagttcacacaaactagttgttgtgaatggtagtaatagtaggacactctttctacttaacaaaggaaagtcttcctttaccttaattcaaaatgctgataaatttaaggtctcataatcattcttcaatgtatatgaagaactaaactaagataattcattctcttcttcaggcaccagttattaactaagcccagttattgattctgggtttcaaaaagcaaactgattgtttttttttttttttgagacggtcgccaggctggactgcagtggcacgatctcggctcactgcaacctctgcctcctaggttcaagtgattcacctgcctcagccttccaagtagctgggactagaggcgcacaccactacacccagctaatttttgtatttttagtagagacggggtttcaccatgttggccaggatggtcttgatctcctgagctcgtgatctgcccgcctcagcctcccacagtgctgggattacaggcgtgagccagggcaccttgccgcaagcggatcttttacccaactattttccctgaatgtttcaaatttttcttctggaaagaaatggttaaaaatttgagatagagaagtgagattcaacaatgtctctaattttatttctttcaaaatgtttccattaataatattctcttcaatatgttgcaaaaatcttggaaacgtagtagctaggacagttacttgtaagtcttgcttgccataacaataatgtctttcgaaatccctggatatgtctgacatgttggaatacatcactgtttttcccccgtggttttaaattcagtttattaagaataccaaaaataccagttaaatatgccaatttttttatccaaatgtcatcttcaaaaatatttgccaaatgagatttttttcaatgagaaaaaaagtcaatctgattcctgagctcataaaccctgcttagtattttcccttgagacaaccaacgaactttggtatgacacagaaagtgggtatggttagttccaatctctgaacaaaacgtttcaagaagctggttattcagtgagtttcctttaataaaactgacaacttcactgcatttttcagtacttccatgagatactgtggaatttctctggatgctaaaccttcatgatgtataaaacaatgattccacacagtacaactattagtcacttctagtaattttttaatgactctgctgtgttttccagttacttttgctgtgacgtcacctgcaattcctttacagtttttccagtttaatttatattgaccaactctgtgcctttctaatcctgtaaacatatctaatctacttgggtatgaggttaaacttaaaaaacacaaaagaccctccataaaatcatctttccacgcatatcggacataaactgaatgtcttgtgcagctgccaatatcatcagtgctttcatcacactgctttgcaaaatctataccagactgttatggagtaataagcattgtttctaaacgttctgcaatactacaaatccaaagagataattgtgttatcattagatatagtttttaatttatcagctaatttctcatcaaaaatcatatgcattgtatccaaacatgctggaagaataattttttcagcagctgtgttagctatgttctttttgccacatgatatgcaactaaatatgatgatacggctctctcactaacagtagtagaacaactaagaaattgtgttgatcattttatgtcttctttctttcttcgaaaatattcaagaggcttatcaataagttcagcatgctgaatttctaagtgcctttttaatttaggttttaagctttcatttgcaagaatattattacaaataacacactgaggtctgtcattttcagtgggcttttcacatttgataaagccatattttaagtaatcataatagcgtcttgcacttaagtttttctttttgaaatgaggctcaaatgaagtttcagtttgcagattagagtctgtatttttctcagtattgtcactattcacacttccaaattcaacagatgaacttcagcatgcttctgtatatttcatttcatgattcctctttcttttaataaagaaattatgcatttaatagcaattttttccagtttgattaaaatggtataattggtactaactcaaaaaagaagaaaaaaatacacatatatatagtttaaatgacatcttttcaaaaactacactcaaagtttgcaattgaatctcagttgactatctccagtttcaagtcattgtaatataaaacttgactgcacaacattcactttgctaatatgaaaaccaagcgagacacccaagagcaaatgactgaaaaccacttcttagccaacatacattgtattcatcatatcccctccatcaaatacctttctcacatattgaaattgacctcactattccttgcaacatgcacaattcaggcaaaggatccatgcaaagcactttgatattttacactttttaagttatactttaagttctgggatacatgtgcaaaatgtgcaggtttgttacatacgtatacacatgccatgttgatttgctgcacccatcaacccgtcatctacattagatatttctcctaatgctatccctcccccatccccccaccccaacaggccccagtgtgtgatgttctcctccctgtgtccatgtgttctcattgttcaactcccacttatgagtgagaatatgtggtgtttggttttctgctcctgtgttagtttgctgagaatgatggtttccagcttcatccatgttcctgcaaaggacataaactcatccttttttatggctgcatagtattccatggtgtatatgtgccacattttctttatccagcctatcattgatgggcatttgggttggttccaagtctttgctattgtgaacagtgctgcaataaacatacgtgtgcatgtgtctttacagtagaatgatttataatcctttgggtatatacccagtaatgggatcactgggtcaaatggtatttctggttctagatccttaaagaatcgccacactgtcttccacaatggttgaactaatttacactcccactaacagtgtaaaagcattcctatttctccacatcctctccaacatctgttgtttcctgactttttaatgatcaccattctaactggtgtgagatggtatctcattgtggttttgatttgcatttctctaatgaccagtgatgatgagcattttttcatatgtttattggccacataaatgttttctattgagacgtgtcctattcatatccttcgctgactttttgatggggttgttttttctgagggttgcctgtttactctgatgatagtttcttttgctgtgcagaagctctttagtttaattagatcccatttgtcaattttgacttttgttgccattgcttttggtgttttagacatgaagtcgttgcccatgcctatgtcctgaatggtattgcctaggttttcttctagggtttttatggttttaggtcctacatctaagtctttaatccatcttgagttaatttttgtattaggtgtaaggaaggggtccattttcagtttactgcatatggctagcctgttttcccaacaccatttattaaatagggaatcctttccccattgcttgtttctgtcaagtttgtcaaagagcagatggctgtagatgtgtggcatttatttctgaggcctctgttctgttccgttggtctatatgtctgttgtagtaccagtaccatgctgttttggttactgtagccttgtagtatagtttgaagtcaggtagtgtgatgcttccagctttgttctttctgcttaggactgtcttcactatatgggctcttttttggttccaaatgaaatttaaagtagttttttctaattctgtgaagaaagtcaatggtagcttgttggggatagcattgaacctataaattaccttgggcagcatggccattttcacggtattgattcttgctatccatgagcatggaatgtttttctatttgtttgtgtcgtctcttatttccttgagcattggtttgtagttctccttgaaaaggtccttcacatccctcgtaagttctattcctaggtattttattctcttagtagcaattgagaatgggagttcactcatgatttggctctgtttgtctattattggtgtataggaatgcctgtgatttttgtacactgattttgtgtcttgagactttgctaaagtttcttatcagctaaggagattttgcgctgagatgatggggttttctaaatgtacaatcatgtcatctgcgaagagagacaatttgacttcctctcttgttatttgaataccctttatttctttctcttgcctgattgccctggccagaacttccaatactatgttgagtaggagtggtgagagagggcatccttgtcttgtgccggttttcaaagggaatgcttccagtttttgcccattcagtatgatattgcctgtgggtttgtcataaatagctcttattattttgagatacgttccatcaatacctagtttattgagagtttttagcatgaaggggtgctgaattatatcaaaggccttttctgcatctattcagataatcatgtgttttttgtcattggttctgcttatgtgatggattacatttattgatttgcatatgttgaaccagccttgcatcccagctatggagccaacttgatcgtggtggataagcttttggatgtgctgctagatttggtttgctggtattttattgaggattttcctatcaatgttcatcagggatattggcctgaaattttctttttctgttgtgcctctgccaggttttggtatcaggatgatgctggcctcataaaatgagttagggaggagtccctcatcttctattgtttggaatagtttcagaaggaatggtaccagctcctctttgtccctctggtagaatttggctgtgaatctgtctggttctgagctttttttggttggtaggctattcattactgcctcaatttcagaacttgttattggtctattcagggatttcacttcttcctggtttagtcttgagagggtgtatgtgtccaggaatttatccatttcttctagattgtttagtgtatttgcgtagaggtgtttatagtattctctgttggtagtttatatttctgtgggattaatggtgatatcccctttatcattttttattgcttctatttgattcttctgtctattcttctttattagtctggctagtggtctatctattttgttgatcttttcaaaaaactggctcctagattcattgatttttttgaagggttttttgtgtctctatctcattgctgctctgatctcagttatttcttgtcttctgctaggttttgaatttgtttgctcttgcttcactagttcttttaattgtgatgttagggtgtcgagtttagatctttcctgctttctcctgtggccattaagtgctataaatttccctctaaacactgccttagctgtgtcccagagattctggtatgttgtgtgtctgttctcattggtttcaaagaacttatttatttctgccttaattttgttatttacccagtaggcattcaggagcaggttgttcagtttctatgtagttgtgcagctttgagtgagtttcttaatcctgagttctaatttgatttcactgtggtctgagagactgtttgctatgatttccattcttttgcatttcctgaggagtgttttatttccaattatgtggtctattttagaataagtgtgatgtggtactgagaagaatgtatattctattgatttggggtggagagttctgtagatgtctattaggtctgcttggtccagagctgagtttgagtcctgaatatctttgttaattttctgtctcgttgatctgccagtggggtgttaaagtctccccctattattgtgtgggagtctaagtctctttgtaggtctctaagaactttatgaatctgggtgctcctgtattgggtgcgtatatatttaggctagttagctcttcttgttgcgttgatccctttaacattatgtaatgcccttctttgtcgcttttgatctttgttggtttaaagtctgtttcatcagagactaggattgcaacccctgctttttttttttttctttccatttgcttggtaaatattcctccatccctttattttgaacctatgtatgtctttgcaagtgagatgagtctcctgaatactgatgcgtcttgactcttcatccaatttgccagtttgtgtcttttaattggagcatttagcctgtttacatttaaggttagtattgttatgtgtgaatttgattctgttattatgatgctagctggttattttgcccgtcagttgatacagtttcttcatagtgtcgatggtctttacaatttggtatgtttgcagtggctggtactggttgttcctttccatgtttagtgcttccttcaggagctcttgtaaggcaggcctggtggtgacaaaatctctcagcatttgcttgtctgtaaaggattttatttctctttcgcttatgaagcttagtttggctgatatgaaattctgggttgaaaattcttttcttcaagaatgctgactattggcccccactctcttctggcttgtagggtttctgcagagagatctgctgttagtctgatgggcttccctttgcgggtaacccaacctttctctctggctgcccttaacattttttccttcatttcaaccttggtgaatctgaggattatgtgtcttggggttgctcttcttgaggaatatctttgtggtgttctctgtatttcctgaatttgaatgttgacctgtcttgctagggtggggacgttctcctggatgatatcctgaagagtattttcctacttggttccattctccctgtcacttttaggtacatcaatcaaatgtaggttttgtcttttcacataggtccatatttcttggaggctttgtttattccttttcattcttttttctctcatcttatcttcacactttatttcattaagttggtcttcaatctctgatatcttttcttccgcttgattgattcgggtattgttacttgtgtgtgcttcacgaagttcttgtgctgtgtttttcagctcatttatgttcttctctaaactgattattctagttagcaatttgtctaaccttttttcaaagttcttagcttccttgcattgggttaaaacatgctgctttagcttggaggagtttgttattacataccttctgaagcctacttctgtcaattggtcaaactcattctccatccagttttattcccttgctgggcgaggagttgtgatcctttgaaggagaagaggcattctggtttttggaattttcagcctttttgcactgatttttcctcatctttgtggatttatctaccttcagtctttgatgttggtgatcttcagatggggttttggcgtggacgtcctttttgtttatgttgatggtattcctttctgtttgttagttttccttgtaacagtcaggcccctttgctgcagatctgctggaatttgctggaggtccactccagaccctgttttcctggttatcaccaatggaggctgcagcacaacaaagattgctgcctgtttcttcctctggaagcttcgtcccagaggggcacccaccagaggtcagctggagctctcctgtaggaagtgtctgtccatccctgctgggaggtgtctcccagtcaggaggcacaggggtcagggacccacgtgaggaggcactctgtcccttagcagagctcaaacgctgtgctgggagatctgctgctctcttcagagctggcaggcaggaacgtttaagtctgctgaagctgcgcccacagccgccgcttcccccagatgctctgtcccagggagatgcgagctttaactataagcctctgactagggctgctgcctttctttcagagatgccctgcccagagaggaggaatctagagaggcagtctggctacagcagctttgccgagctgtggtgggctccatccagttcaaacttccctgtggctttgtttacactatgaggggaaaactgcctactcaagcctcagtaatggtggatgcccctcccccaaccaagctcaagcatcccaggtagacttcagactgctgtgctggcagcaagaatttcaagtcagtggatcttagcttgctgggctctgaggaggtaggatccgctgagctagaccacttggctcctaggcttcagccccctttccaggggcgtgaatggttctgtctcactggtgttccaggtgctgctggggtatgaaaaaactcctgcagctagcttggtgtcttcccaaatggctgcccagttttgtgcttgaatcccagggccctgggggtgtaggcacccgagggaatctcacctgggttgcgaagactgtgggaaaagtgtagtatctgggctggagtgcaccgttcctcatggcacagtccctcacggtttcccttcactaggggaaggagttccccaactccttgtacttcctggatgaggtgacaccccaccctgcttcagcttgtcctctgtgggctgcacccgctgtctaaccagtcccagtgagatgagctggatacttcatttggaaatgcagaaatcacctgccttctgtgttgatctcactgggagctgcagactggagctgttcctattccaccatcttgccagccacctacatttatttttttttttaagtttattgtgactcacagaattaatttcatgcctcactaatgggtcacacacatagtataaaaaatactcatagagagacatgttgtgccctttgctgtgttggtgcctcgagtatgtcagcttgatgatgaaagagactagctgatctgctagactgttgactcgtataagaatatcttgaagtggtaggaatgtatcttaaattttcattcctgatactttttcatgggaagcgtttttaagagtgccagctatgctctgatctagtgaggagccaatgaggttttccatggctaggtcaaatatcaggttggagctgatgatatatttttatggaactctcctggagtgcatccttgacctccagctcagctgctgcgacccggctaggcccaggaccacaagcctcacatctctccagtggagctgccattggccttgcccccgattccctctgaaacaccacgtccccatactctcttctaatttcttttgcaaagaagactgaaagccagcttatctagtaggcacattagggaccagccctataaaaaagtattaattttaatttcttttaaaaatagaaaaaaatgaatataaaatatataacaacgaacccaaactggattatatttgtctttatactcatgaattcataaaatataattttaagtattattttatggaggaaggagctcagaaagacaaacgtattggggactcacaaaagccataaataatttggccctgatattggccctgataggaccctgactcattggccattttggtgcattgacttgctgtgtaaatttggatatgtttcttaatataagggttttttttttctgccagaaaaatgggaagaaaaatttctgtacccgcttatttcccagggcttttgttaagacaaaggtaataactctgacagtgtctaaacttttcagaagattggtttatataataggactatttcaattgcacataacaggtatccatctcaaatcaacatagaaagaaaggaaatatattggtgatcataactgaaaactctaggtttcagctttaagtgtagctggctcaggaaacccaaaaattttgccaggaatctgtttctctcttttcctctcttgtgggcctgcttctctctatgatgaatttctttcctagcacacttttcccacatgttgaaagaatctcaaagactccaggttttcagaatccttaagcttgtgacctcagaagaagagactcctcctagagccccccctgttcctcagaggactccaactgctcattgcttgggcatcttggacatccctgtgtccaggggatgggtcttctgtctggccagcttgtcatatttgcccctcttcctccctattacttgagtggcagtcccacaagtctcccttggaagcaagggcagaaccatttctaagtgaagaaacacaagcagaccaaataacatgtccattccagggctgatcagtctgaggcattgttaaaattatccctcttgcaggacgttagaaccaattgagattcattcagaacctctacttaattttccagatgtgagttctgtgtgtgaccatcagggtttagtagatactgcacagactcatttaattgtcacaaaacctgtgaggcaattattagctctacttctacagataataaatgtaaaaaattattgagagcttgccataaactaagcactttgctaaaaaccctacatatatctaataaaaattccatgaggtgctgagtctgttgaggttctttagattgtaagcaacagaaaccaaatctagctagtcaggaaaagaacaaatgaattgaaaggatgatagagtatctaatggataccctgtcagaggaaggattgaacaatcaaaacttggaaggacaagaacccattcttgcctgatcttgtccccttaggaggtgaatttggggttaaacctggtgcagcactgctagctcctagcccctattatcactctgttccaaataccacgtttcagggtgggagaatctgattggcctatcttgggtcaggtgtatatccctggaccaatcaggttgaaggaccctgtaacataggcatggccaccaggctctctcaggtttatataggagctgtgctcagagaaatggaatccctgtgagctgattggtcactcaaagggagataactgcaagcacacaattctatcactcagggctttggcacattgaaaagtgggtaattgaagagcatttaatgaggggattaagtgagaagagtttagggaaagcaacaaaggatgttgcagtatcttggggctagtgagtatgggagctgttaccatcccaggcctgaaggggaaagaggaggtagtggcttctggaacctatggaaagagctgtcaaaaggctgcctgaaagtagtttcagtctctgggagagggtcataaccaacccttagcaacccagtggtgtgggtaccaggggaataagcaccaagatgtcactctcctcccaccttcccatttcatgggtgcaactagaagccagagggcaaaggagtccctggatgtggttcatataggccatcctcctgggacacaggtcagggtagagaggaatgagagcacatatggaagggcaaatagaagacatccaagacaataatacaaatcccagtttacagatgaataatctaaggcttgaaggacttagtgacttctttagattcacacaatcaactcaagggaggagctaggacttgaactcagcaagtctgactctggaacctgtgctcttaaccactaggctctatcatctctcggatgaagaccctgaattcagacagcagattgactgtgcacagctcagatgaattacgttatctcactgatccccttgtagtatcacctcttagctgcggcaacaacaagagctcctagtcctgcttcccagaatggtgctggaagattcacacttgccattttccctctagactctcccactgggattcgcagatctacagagtggtttgaaatatcagaggcagcccaagtagagtccaagcttcttgccaccaggcaggcagctctactctcctgtgagtagggatatgattgagatttaaattgaacttcaattaagtctctcctctcttagtcctcaggggggcattctcatgcctggactaatgcacttctgagagctaataccattatcagatgcctgttcatctcatataagtaggcctattagcgcctcatctgtcttgcctcctgtttcctgccactgcttagagcccccagacaagagcacttccaatcaggtatgcagagggaaatatcattaacagttataatattatctgtatggttttatttcatgtcccattattttctagctctttagctaataataggttatatctgttatacatttaatgtatgctaggtactgcactgaaatgtctcatttcatgttgacaataaacctaggaggtaggtaatatttaatccccactttacagatgaagaaaccgaagcttatagggcttaagtatgcctaaggtgacataattaatagacagcagatccaagatttgaacccagatggactggctccagagctaaaaccacttaatcatgatgcttcttagaaccctacatggcctgtattcataaaatagttgactctagacactcttctcccctttcaaagtgaaattttgatttgtttatggaatggggtgtggtggagactactagtgatcaccaaataccaatgtgttcctataaagtccctatttctgttgcagttgatttggagttatgtgatgtgtagcccatcagaagtaagcagaaaactttgtgccgttttctrtcctggaaataacacccccgccccctggccccgctgcattatcagccactcctcttcactcctttctatggctccagaagtgaagagctctgaaatgcctaaattgccagatgkgaacatctttactgcttggagaaagccacacaggagttacctgacctgccttggatggtgacatgagtgagaaataaacctttgttgggttagactgctaagatttaaacttaaaagtgtttttttaatgtttagtttttgtggctacatagtaggtgtatatgtttatggggtatataggatcttttgatatgtgcatacaatgtataatagtcacatcagggtaaatggagtatcatcacctcaaacatttattctttctttgtgttacaaacaatcccattacacagttttagtaatttaaaatatataattaaattatygttaatgatagccaccctgttgtactgtcaaattctagatcttatttctttctattttttgtacccactgatgaatctctcttccccctcaccccaccaactacccttccagccctcagtaaccatcattctgctctctatctccatgattcaattgttttagtttttagctctcacaaataagtgagaacatgtgaaatttgtctaactgtgtctggcttatttcacttaacataatgacctccagttctatccatatttttgcaaatgacaggatctcatttatttaatgactgaatagtactccattgtgtatatgtattacattttctttatccctttgtctattgatggacacttaggttgtttccaaatcttggctattgtgaatagacactaagatttttgagttaatttattactagggtatagtttatcatactatgactaatataaatatcatactaagacagatataggtacattgaaatagggcactgctataatagctgatggtgtgctgagaggaagcctggtgytggagaccagaaatatgtcaatgcatgttatgttgtgccaaaatattastaaccaatctaacttgggaggcaagcttcatatttacttatatggcatctctaggaaaagagactgaaaaacagaacattagtagatgtgttggctactatttctgcatttggcaagtattacaagaaaacttcagaataggactggccagagacttgcagaatggacaatacatgatccaactatatgctgcatataagagacacatktttgattmaaaaacagaaataggttcaaggtaaaagaatggaaaaacatatatcaggcaaacagtaaccaaaagaaagctggagtggctatactaatatcagacaaaatagactttaagacaaaaattgttatcagagacaaagaacagttttataattataaataaatcaatttgtcaagaagatataaaaattataaacatatatgcacctaacaacagagacccaaaatacatgaaacaaaaactgacagaattgatacaataatggttgaagacttcaatacaccactttcaatcatggatagagcaactagacagaaaatcaatatgggaatagagactaaataccaatataaacatactagatctaatagcaatataacccttcactcagaaacaactgactatacattcttcttaagtgcacatggagaattctccagtttagaccatatgtcaggtcattaaacaagtttcagtaaatttcaaagttctgaaataatataaagtatgtttcctaaccacacagaatgagattagaaatcaataacagagggaaattcacaaatatatggaaattaaagaacatttctgaataatcaatgagtcaaagaagaaatcacagacaaaactagaaaatactttgagatgaatgaaaataaaaacatgacataccaaaacttatgggatgaaaccaaagcagtgcttagagaatattatagctataaacacccaaattgaaaaaaggacaaagaactcatattagtaacctaaacttctaccttaaggaactagaaaaacaagagcaaactaaacccagaacaagcagaaggaggaaaccaataaagattagagcagaaaggaatgaaatgtaaatagaaaagaatagagaaaaaaaaacaaacccaaaagttggttctttgaaaaggtcaacaaaattaacagacctttaccttgactgacagagagagagagagagagggagagcatagagagagagagagagagagacagagagagagagacagaatcaaattactaaaatcaagaatgaaagaggggatgttgctaccgaccttgcaaaaatagaaaggaatataaggtaatattatgaacacttgtgtgctaatgtgttagataatctagataaaatgaacagattcctagaaagacacaaattactgaaattgactcaagaagaaatagaaaattgaaacagacctgtaacaagtaaagagattgaattagtgattaaaagtacttgccacaaagaaaagtagatgacaaatggcctcactggtgaattttataatacctagtattaaagagttaagcccaatacttcacaaatacttccaaaaattataagaggagagaacattttccaagtcattctatgaggcagtattactttgataccaaaggcagaacaaaatatcacaagcagaaaccaatattccttataaatatagatgcaaaatcctcataaaaataccgggaaactgaatcagcaacatataaaaagtattttataccatgacaaagcaggacttatggcaggaatgcaagattgattcaacatgcaaaaatcaataaatgtaatatgccatattaatagtataaaggacaaaaaccacattatcatcttaatagatgaagaaaaagcatttgacaaaaaccagcaccttttcatggtcaaaacacacaacaaagtaggaattagaaagaaactttctcaatcttctaaaaagcatatatgaaaaccccacagctaacatcatacctaaaggtgaaagaataaaagctttcccctaagataggaatgaaacaaggatgtccactcttgttacttctattcaacattgtactggaggttgtagttagggaacttgatcaagaaaaaaattggcatctatatttgaaagaaagaagtagaatgatctttacttgcagataacatcttactgaatatagaatatcaagggaatccacaaaaaaaatcttagagctaacaatgagttcagcaaggctgcaggatataaggttaatatacagaaattgcttgtatttctgtacactaataatgaacaatccaaaaatgaaattaagaaaataattccatttacagtagcatcaaaaagaataatatatgtagagacaaacttaacaaaagaattgcaatatttgcacactaaaaaaagatgaaacactgctaaaggaaattaaagaagacctaaataaatgaagacatcgcatattcacaaattggaagactcaatattgtaagatggcagtactccccaaactgatgtatgcttttgaataatatacagtatgttccctaaccacaacggaatgaaattagaaaatcccagccaggtttttgcagaaattgacaagctgataataaaattcatgtggaaatacaagggatccagaatagccaaaataatcttgagaaagaagaacaaagttggggcattcacattttcaggttcaaaacttactacaaagtgtaataataaagatagtgtggtactagcataaggatagatatataaatcaatcaacagagagtccagaaattagcccacgtatttatagccaattgattttcaataaaggtgccaagaccattcaataaggaatgaatagtctcttcaacaaatggagctgagaaaactggatatccatgcaaaagaatgaagttggactactactcacactgtacacaaaaattaattcaaaattatcaaagatctaaacttaagagctaaaactataatactcttagaagaaaacataggtatacatggccttggattatgcaatgatttcttacatatgataccaaaagcacaagcaacaaaagaaaaaacagtcttcatcaaaattaaaggacactattaagtgtttcaaagaacactataaagagagtgaaaagacaactcagaacttgagaaaatatttgcaagtcatgtgtatctgataaacatctagtatccagaatatataaagaactattataactcaataacaaaaagaaataacctaatttttaaatgcacaaaggatttgatagatgttttttccaaataagatacacaaatggacaagaagcacatgaaaagatgctcaaaatcattagtcattagggaaatgcaaattaaacctaaaatgggataccacttcctactcactaacatgactgtgattaaatagagacaatgacaagcgctggtgaggatgtggagaaattggaacccttatacactgctggtgggaagtcatatggtgttactagtttggaaaatagtttgaaagttcgtcaaaatgttaaacatacaattcctgtatgacccatcaattccactcttaggtacctatctaagagctataaaacacacacattcccataaaaatctgtatataatttttcgtggcacaattatttataatagctcaaaagtggaaacaaccctcatgtccatccaccgatgaacggattaaaaaaaatagtgtgtctatacaatggaatatgattcatccatataaagaaataaagtactgattctcattacaacatggctgaacctcgaaaacattaactgaaagaaattggacacaaaaggccgtgtattatattatttcatttatctgaaatgtctagaatatgcaaatccatatccatatctacagatagtagattaatggtttctaggagagaggagaagtggtaaatggagagtgactgttaatggttccaaggtttcttttggggctggtgataatattctgaaattagatagtggtgatggttgcacaactttgtaagtatagtaaataccactgagttgtacactttaaaaacagtgaatatcatggtatgcgaattaggtctaaattttaaaaaatttaaaaaagagttgcctgtttgccagtagaaattaactaaaatagagaaaattcagaatactgaggcctgtagaattgaaaaaattgactgtttctagtttccggatagtaagagatggaaatttaaaaggcgttgcataataaggcccaagaaaatgtctcagttgattaaaatcccagctcatgcctataatcccagaactttcagaggctgaagtgggaggattgtttgagtccaggagttcaagaccagcctgggcaatatagtgaaaccccgtccctacaaaaaaattaaaaaactagctgggcaaagtggtgcacacctgtagtctcagctagttgggaggcttaggtgggaggattgtttgagcccgggaagttgaagttacagcaaaccatgatcgtgccactgcactccaccctggatgacagagtgagatcctgtctcagaaaaaaaggaaaaaaaaaaaaaaggaaaatatctgattaaaggtgcattcctttgttctagctagcttcaaggtagacactatcatattgaaagacagagggagcagggggacaagaaggcgaaaggtaaagcaagttggaaaactgtatcttacaaaagcaaccttgagtgtggatattggcaaatagatcagatgcttaccaaatttttgaggaaacagtattgtcaaagaaaccacaaggctgtataaaaagcgttagtccattagctaagccttaaagcaacctctggtaggaagttgcacatcccctaaagagagtattctccctaactccctctttacatgtggtcaagcagtatcagggtccaggaggaagcccctcagagtgtggtgccaaggatcacaaagaatagtggaggagggagttcctgctctaggctaggcagcctttataacatctgcccactggtatttcagcactgtcacaggcagtgactactgtgggtctcttagtcttcccctttctgaatgggagttatcctgttcctgttattgtagttatcctattcttgttctattatcgcatatttgtatgctgtcatggtgtgttagtctgttcttatgctgctaataaagacgtaccagagactgggtaatttacaagaaaagaggtttaatgaacttacagttccacatggctggggaggccttacaatcatggtggaagacagaggaaaagcaaagggacatcttacatgtcagcaggcaagagagcttgtgcaggggaattcctctttataaaaccatcagatcttgtgagacttattcactattatgagaacagcctgagaaaatacccaaccccatgattcaattagctctcaccaagcccctcccatgacatgtgggaattatgggagctacaattccagatgagatttggctggggacacagccaacccatatcacatggatatgaggcagacaycttgacttttcagttcacaggtgtaagagaagccatgtcttttcctgatagagaggactaagaaatgcaaagctataatagattggactttggattgtctttcgtgaggagtggtggaagatgctctaccttcaggacgaagggaacaaagggatatttaatggccagaagagtgaactgcagtggagactgttgttgctcaccaagttggctcacatgtgcttctctaaatttcccagcctaaggtgttgtccagtaattttcctttcttgtaatatctttctgagcttttggaatcaatgttttgtgggccttataaaatgagtttgaatgtttcccttcttctattttctggacacacctctgcaggccagtattaattatctcttaaatttttgtgaagcaatctgggcatatagttttctttttggaaacagttttaatttcagatttgatttctttgatagatatagggctattggtattttaaaatttcttcttgtggcaattttggcaaattgtattttaagaaacatgtttcacttagattttctaatttactggcataaatattggtgtatagaatgccaatctattggcataaagttttttctaacatcctctcattatctttttaatgtctgtaaggcaggtagtgatattctctttttcaaggctggtttttgtatttatgtttttttctctctcttgctctctcttttcttgaattgtcttgctaggagtttattaagtgtattaatctattcaaagaataaacttttgactttgttgattttctctattaaatgtctgttttctattccattgatcctgctctgtattcctctcttctattttttgagggggttaattttctgttttttgtttttgtttttgttttagcttttttcctattatttaaacatatattttaaagaaagatttttcttacatagagacagggtctcactatgttgcctaggcttgtctcaaactccttggcttaagcaatcctccaggtttggcctcccaaagtgccgggattacaagtgtgagccaccatgcctggccatttttctagttttttgagttgagaacttagatcattggttggtttttgtttttgttttttttgagatggagttttgctctgttgctcaggctggagtgcactggtgcgatctcggctcactgcaacctccacctcctgggttcaagcagttctcctgcctcagcctcccgagtagctgggattacaggcacccactaccactcccagctaatttttgtatttttagtagagacgggatttcaccatttcagccaggctggtctcaaactccctatggcagatcatctgcccgactcagcctcccaaagtgctgggattacgggcgtgagccaccgtgcccagccagatcattggtttttaaccttccttattttttaatatatggacttaatggtatatgtttccttctagattctgctttagcagtgttactgaccacattaccactcttctctccacatatccagcagtgaaagacttctgatgctggaaatgcagaatgaatctgcatgaatctctgagtcactgtctgggatgcaagagagctgcctcacatgcattggctagtgatatatgcaagaaacatacctttgatgtgttgaactgctttgtttctttcttaagaggctggctatggcctatcctatcctagctgttacaagagggcttgttttacaatagctcttatatctgtccatattgcagtttgcaaagacttcccattgattcccccaagtgtttttcctgaagatgtggggttaacggaggggtattacagcatagcacacaacacaaaacaattttaatttaatatacagtcccctccttcccccagggaatttttcattgcctgtctttcagattcggccctgacctattgtcaagttttaaggtccccttttctatttaaacctctttcctcactttccatattcttgcttcttcccatccatcctattccaaagcaacccgaagctctccagctttgctgttgtagcttttctttaccttggatcaaatcagattcttactcaaggtctcttttctactgaccaatgcatactcagatgtctgttaggcagaaatggagcagtgggaagcctgttggagaaacaggacaggccctcctgagctgaaagggttttcccccagaatctagagtggtatttttctttattgtactgcaacttacttacttctatgctcaggtttttattgattttatttcatttgctttatttctacatagttgaaatcatgttcttgtggactgcttttctaacttaatgttctatcagaagcatttaccatattactgtataatattgggaaacatctgttttatattcacattttttcctatttaaaaacataattttcagtcctgaaggatatgagaagaacatgcaactccccaaaatcctactcccgggcagaaaatgtttaacaaattaggctgcatgatttcagctgctgacagctagacagaaagaagaatatttctaaatatgtctgtggagagactgcttggacagagctgtcccttgcaagactataccagaggcatggtcttagtgggacagcctagtgttctgagcaccgggactgtcagattcacatgtatttggatggtccagagcaattgtggtggcagaagtctgtttgcagaaggatctagaaacctcttgggaaggggtctagcctgtgaatgttgttcactctggcccagcctcagagggaagggctgtagtagaaaatgaataaaaacagggcagttcactgaaattgctgtgagagtacagggcgaccgtgtttcgtgttctcagtaatagtgacgcacggggacagggaggggatagtgggagggatctctccccttcatagtaaaaaccctgggacacaactgctgagccttaaggccataagccataaggcctgattgagtacaagtcaccagctacaaagaaaggcaaggaaggtcagggggcaaaggtggtgacccttagcactgtttacagatcctcactgaggaggaaagaaaagctacagggacaggtgggcttggccaggtacttgtagccatcaggttcacaggaggccttgaggtcaggtcagaggcaggaagatcctgtgctgaagagtaaaacttggagaggggccttgtgagatcttgcgagggatctggagaaataggatagggcagtgattaaaaaggcctatcaggaccaggctaacaggagttagccagggaacatgagacaaataaataacttggaatctggcttcattggaagcttgctgcataatcactgtagctgctctctcatcttggccctttaggcccagaaagtaacagccctgatattattagctcttgagtcttgcacagaccctcactgtttccctacacacttgccacacctttgaaaatagtccttctatgaaatgacctgttaaatcaatttgcctaatatgaatgcaccatctgcctgctgctgggactactgatgcagaagccattctgttgatggctccagggggaccctctggaactctggctctcagtaaccagctctggagataaaagacagggactgagatttaaatggtggaccctttatatcacataaaactaaagatatagattgtgacttcactgacatacttcagagatccctggtagaaatttggtaatacatggcagcctaactcatcaggatgagtagagattaaagagatctgatttgaggcaggaatggggtggtggtattaggggacaagaaggctacagtcagacctcagcccagggccatgatcatcactcagacctattcctcttgctctatggagaggagctgaacagaaggccagaccctggaagaggaaaagaattaaagttgaagactcccctgaagaaggaggagggtggaatgggtggtacctggcactagagtgtctgcacagggagtggcatgagtgggcacctctacaactttgatggaaggaagcaaggtgcttacagagtagctgtggggagaagaactttcttcccctctgaccttcagaatatgctcacgtggaaggaatgcgtgagacacacagctggaaatgttgagaaaacacaagagcctgggcctgaggaatcttaaaataggtttgttatatatttaataaatgctggaaaagtgacaggatttggaaaagttaatgtaaaaacagcaccaccctggagcactaaatctggttttatttacccgggccatctggtacttccctttggtaaagtaaggaatttatacacattgaaaaccaagctttaatgcgtaaacttaacagaatgtccaatcacaagtatgtgatagaagtaaagtaggggaagaaatgactcaggtattattcccctcaattctcccaggacctttgcacatgccattccccatgtctcctccctcatatcctgacgaaggttgagttttcttgttatgctctggtatggttcttgtattttttcttcacagctctatcatagtttgaagtcatttgattaacgtcctgtgtcacccactagctgatgacctccatgaagacaagaatggtgctctgctcaccactgttgctctaggacccagtggctgacacctagatgctcaatagatctttcatggatgacaacatgaaggacttttaaagcatgtcaagttgagactagcttcccaaattagagaaggtgacacataatatattaatataatcctggtaacctcaggcctatgttgcctccatttctctgacacatttctgacacattaccaggagggagtcctgctgatgtcaggaattcatgaggaaggggggtgaaaactttaatcagatcaaatcttacctttagagcaggagagacatactttctctttgatctccctgaaactgccaaaaggtttttgccgaactcataggtctttggacctttcagtgggtgctacaactatgcaaatatcgtggtgcaccaagaccaagctggagaagttctgaggttgtgaggatatctaaactgtgctgtgttgatatttttatctgctctctttgatgcaagcttctaggcctggtatactcaagttaaccacgaaaaccaatggcggttatatttggaaaggaaggctatgccctggtgaaattatacgtgagacacaaaaaatactgaggtcactggtcagtgatgttagagagcagctcagtaaggccagtgggaggtgtgatatggtggcttaattaaaaggcctctggcctgtgccctctgccttttattcttcgtcacttcctcctttctgctccatgaaacatgagtgtaatggctgaagctctagcctccgcctcttttttttttttttttgagacggagtctcgctctgtcgcccaggccggactgcggactgcagtggcgcaatctcggctcactgcaagctccgcttcccgggttcacgccattctcctgcctcagcctcccgagtagctgggactacaggcgcccgccaccgcgcccggctaattttttttgtattttttttagtagagacggggtttcaccttgttagccaggatggtctcgatctcctgacctcatgatccacccgcctcggcctcccaaagtgctgggattacaggcgtgagccaccgcgcccggccgcctccgcctcttccttaacaaaggaagagctaatttcccacgccccccctcccaccacaaagtatgagggccacactggagggatggtagagtgatggctggaagaagtgtggggcttttgtggaacagcctgtaatgtccaactctggactatttagggaaaggaaatgagacagaaatttttctcttgtttaggccactattattgtgggtctctgttaccatcagccgaacttaattcccgtgaatatatttgtgaacactaaattattggtgcatcataagctttcatcatgttcatttagatagggatctgaactttgccataggtgactggtagtgatctggatccagtgggaattgtctggaatgtgatcaagacatgaaatgtgcagatgggccagtgacgagggcttaccttttgggagcagttgacaggtgatagataccgatgacttctagctgatttattcctcttaaagagtcatcctttggatgaatcgtgagctatggaaacgattgctcaccctgagctgtttggggcttgtgttcttctcaagatttctgaggacctggctcgagcttctgtgtcagagtcctcattctgactatggggcctcagtccttttttggtgtttatgctctttctctggctgctgccctcctttcctcttctgagccttgccagtgtggaacatgactgtcttctgtgttcccccagaacacggctaaaccgctttgcctgaagccttggggatactggatggtggatagagacccacatgctctgccctgttcatacttaatgttccaaagaaatagtaaagttctgcaataacagtttctaaaaaaattcaatctttaattttgttgttcttttgataattttttactgtggtaaaaatatatatataagttgccattttaaccattttgcatgtgcaattcagcagcattaattgcattcacaatgtcatacaatcatcacaattttttgatttcccaaattaaattctttaaaaaatgtttaaaaattttttaaaaatttttgttatttttgttttagattcagggggtacatgtgcaggtgtgttacataggcatattgcgtaatgctgaggtttaggcttctaccaaattaaattcttaaatagagccctctttcctgacccagagatgttatagccccagtgaggtcatagttcggcttctttttaaataacaggaattcaggaacttgaaaaatccccatgcttttctctggtataattttagccaccccttcctccagatgtccctggtagaatgcacagatctgtggatgtattgagtgttgatggtactgtcgaaggctgatggtggccagcccctggagtctgacattcaactgggaagcaaacaccgtgggacaggaaggctacagaccctcactccagattcagcttttgaccctattgcccattgaatggttgggtgagcagttctgaacaaggcaccaggacgaaggtagcttgagactaggaaaactagaagctacagccagggaggactcctgggaaagagtatggcctaaggggaatgtgtgtgtggtgggcaggtgggcagcaatgggggagactgcatctctgggagacagaggtcatagcctcacctgagttccactctactcacctccctctccctgcttccaaaaattttagacggctatggtcagcctagaatttgaagtctgaatttcagatgataaggcagaagagttgaagcagattgagggcagagaatttgggaaattctatttgaagctgtgactctcatctatggatgttcagctgcagagtctcaccagaataatgtaatgttgaggctgctggtggcattttggagactatgaaagatacacaaacatggaaacaagatagtggtgacctggagcaataaactctacttgtgtagctgaggatgatcttgtacagagtcctggcaagaaggtagagacgacaggtcattcttagatggagtaaaggactgctaattttcagacttcagtttgattcagaaactgtgtccctatcagcagacagccatgcctggggagcaccagccccctgccatgcacttagataatggagggagggttttgtggtcacatgtggtaggccccaagcttcagattcccactcatgactctctttcactccagtctggtgacgagttagggactctaagctcaaggacccaaggttccccgaaacagactcagcccagtcctactcctgagccctcttcttgttgtctcctgacctggtgcccaggacaccccccctccccacttcctgccataatcctgagtgcacgcactctgtgatgaggcctagctgtcacatgcactaattttcaaagtgctcagatttggttctcttctttctagaaacccatttcagaaaaaaggaaccagatcttaacagtaaggagactgctgtgccaattgtcagactccagtttgcttaggtctgattgactacacagattaaaatcctgggaaggaattaggctcaaactggagtggaggggtggtgggggaaaggcttatactctcattatgccacagcatcagggtaggctgcaatgcccttccacacgtggtgccctgaaaatgtccctggttattcttctttcagccatcatgtacttctgaggtacctatttctatcctagtgtcaggccatatgccatgatttctgtccactcaattagcagaaggccccagggcactttggtttgaaaactggctatatctgatgaggctttgctaatgtgctctcagaagcagagtccttctcttattgcctcctgtggggagatttggacctctgtagcagagaagactgtaaaggtcgtagagaaactgggttttcggaggctgccatgcccatcttgtatacatgtatgcattgtgcaaccattattcagaagggagcataagtcagggcatgggaacagagaccccaaacagatattggcttccaaaaacgctcaaataaccccatcccccagtgcattaggagtcagagtattgttggaggtaacctgaagctctggtccaagtgctttcctaggtgttcaaaggtctgaatgagtggagcatcaggccgattggaggagaggagctgacagcacaggatgtctgtccctggtgtgaagctggaggagagactggtggtattccttggggtggggtgagggtgacagtgggggtgagagctagagggggtgaggggtcgggggggtggttgtattggcagaagactagttaggtggtattcttgttgaactgaggcaatggaagggttagattaaatcagtggtcttcacaggaggtgtagaatgttccattgaaatgtaaaagaaaaattaaaacttttatttttactttttttttagtctaaaactaaaaagctaaccttcaccaatgtttactattatacattttaccctcactcaactcatgcattgggtgtccatgtcatgcatcatatcagaggcaagtcagggaagagaggaggttctacaacatgggggatggagaaggggaccacagcaccctccctggcccacctgctttcaaaatctattgctaggtcttaagaactatttgtgtcctggcagtggatagacatattatcagttttcactaaactcttctcacaaaagagacaagtggtttgaagacattcctcaaaggaacccatagactgaaaataatatgaacaatgtaagcaaaagcaaactcagaaaatggcaaagttgacgatttcttactactaatatgatatccattatgatgattagtcagctcagtagtagtcagctctgacaactaagttcaaatttataaaaaagactacttgaaacagggatttacaccaccatatgttggcccttgaggtattagctaataataatataaacatgaaatcatgatcagcaagacatgtaaatgctataaactcagggcaagaagacaaacctctacgatttttttttcagggattttccaagtcatgcaatacttagttgtgtactttttaaaaattattttttggccgggcgcggtggctcatgcctgtaatcccagcacctttggaggctgaggtgggcggatcacctgaggtcaggagttgcagaccagcctggccaacatggtaaaaccctgtccctactaaaaatacaaaaaaaattagccgggcatagtggcgcatgcctgtaatcccagctacttgggaggctgaggcaggagaatcacttgaacccgggaagcagaggttgcagtgagctgagatcataccactgcactccagcgcctgggcgactcagtgagattctgtctcaaaaaaaaaaaaaaaaatagtgctcagaaatctcttttgaggcttcttatttaatagtaaaagacaaaatatcagtcaacatcactggaaaaaacagctgttgtatttgccatggttaaagtgactgagttaatacagagagaagatggtagtacataaaaatgtattctgttggaagacacacagactttaagtttgaagaataagttttaaaacacatggtgtgttgtggaagttggctatatggttggatgcaagttgctaacatgtttcaccttgagtatttgctatgctttttgataatgacattcataaagaaatattttttgtgatctactaaaggaaagatagatatgttcacaacagtgaacaacttagtaaaacatgctgtggtttttatgggtgaaagtaaaccactgagggagtggctgccctctctggaatacaaaatgaagggtggttggtgttttgtatgaccagcaagacatgtaaatgctataaactcagcaagacatgtaaatgtctcgttctaccacttgtctcttttgtgagaagagtttagtgaaaaccagaaaacgtaatctgtctatctactgcccaggatacaaatagttcataaggcctagtaatatactttgaaggcaagggtgtcatggtcccattctctgtcccccgtgttgcacaacctcctctcatccctgactatgcctctgatatgacacatggcatggacacctgatgcatgagttgagtaagggttccatgtagttaacattggtgaatgttaattttttttatttttagactaaaaaatatgtagaaataaatgttttaatttttcttttacatttcaatggatcattctacacattctactttgaagactactgatttaatgttacccttccattgcctcagttcaacatgaacaccacctcactagtcttctgccaatgcaaccacttccgctacccctcaccccctccacctctcactgccactgtcaccctcacccaaccccaagcagtagcagcaccaccaatctctcctccaaaactggggggtggttcgtgttctggtccatgaggactacatgtgaaattcagcaatcacattattcatttacaaagtacaacaagaagttgaagcaagaagatcatgaaatactatgggatgtcaataatatggttaattaaaaaattaaaatatagcagaatctttatagcactttgtattgagatgtggaatgagactaaaaatctttcttatgattccaaggtttactgattatctcaaggcaaacaacttgaacgctgtgaatttaaagatgagtttccttaacaaagaacaagtgctccaaatttgctgacctccgatgtgctggcctgagattgtcacaagtgtgatacatagcagaaagaaacacacatatacacacacatacacacacacacacacacacacacacacacacagtatccttttgggtaaaggtgatatttcagcaatgaactgacgtaacaaatgtgctttagaagaattgtgttatagggaaggcactttgaaaattgacgtttggaactgtttccattatcatgtgattttcatgccaaaacgaagcgtgctagtgtcacctatactctcatagccacaatctgcaaaatgtagaagcatacttctaaatccattttacaatattgcaaatgcagaatttcaagtgttttaaaagtcccatttgttaaaatgatttgcaagaacagctgaggaaaacatcattgaaaatgttgatttcatagacaaagaagagttttcacatttgcaaaattgatagatcaaatttaaacagtaagaactatgatttaataagtgcaaagatacagttcttctattcaggtctatttaatctttgtgagatatcttttttttttttttttaaagaatagccattaagaccaagtatggacattaactgaacttacaagtacactttctggtctcataaagtattaaactaagatttatttaaatcatttttaatgatttaatcactaaatcactaacagattagtggaatcactaaacagattattgctaataactttaaaatgaaaagaaaaaggtatattgtaccactcataaaaatgaaacaatttaaaattattgtttcatctttaccacatcctttaatttttttagtgttctttataatatgtaactcattaacgcagtctcatgtgcaaaacgtttatgaatacacgaattgcgagtatcagaccaatcagactatggggtagaaggaatacaacttggtgcttacatgagacaactctgtgaaagtggttgacacagtgaggacacacagtgggtgctcactaatgaagtttcctctccgagcttggtgacttactcgttgagagaggaaagggagaccgagtcaagaatggctcccaactgtggccccgtggtggtgccgaccccggtatcattcactgagactggaaacacagaagcaggttctggcgttttcctgggaagcaactaggtagtttgggtctggaccgcttccgccggcctaggaagatctagaggagatgttccctaggcagttagattcaccatcttcagcagctcgggggcattctgggctggagatgaaattcaagagccatcatccggcaggaggttgttaaaaccatgggagtggctgagatgcccagagtgggccttggagtgggagagcgggctggcacggtgggaccctggggtgggaccacagagaaaagccaggccgcggaggccgagaagctgtaggtacccaggtatgtgaaaaatctggaggtgggggccgcgggtgccaactctggaaactgcactccaagcgtttcaggaaggaagacgtggtcagcaggctcagatgccaggaagaggtgagcgagggaggctgcacggcacccagtggctttggcaactaggaggtcattcaggactttgaggggcaggtgaaggcagagcgaggagggttggagagggagcgtgtgcacgtggtgtgtgtgtgtgtgtgtgtgtgtgtgtgtgtgtgtgtgtgtgtgtgtaggtgatccaagtgaccagaaggacgcctggaagagtggacggttggcgagggagtgtgtgtgtgtgtgtgtgtgtgtgtgtgtgtgtgtatccaagtgaccagaaggacgcctggaagaaaccaatgcttgcgggttgctgcaactacagggagcaagtcacctgtgcggggccgagacccccagagtctcgcgctgggaaaagttgtgcggggaggggaggacgtcgggcaagcccgggcggcacggggagcggtgtggaagcccggcggggccagcgcagttgaggtctggggagcccggctggcatctgctccgggctgcggcgcgggccccgcggagcccaggaggcggcgggtgcttccggccaagggccctggcggccgccgcgcccctgctgctctcaagtttcccgttggcggcgcggcccgggcgcttcaggtagcctctcggctctctctgctccgctccgcgcccaggtagggcaccgacgggggctgcacgcggctggccggcttcctccctgctgaggcggccctccctcctcccgcggggccctcctggccggggatccgcagcgctgcgccctctgaacgcccggcccccgcgcctgctgcggggcgcggcctggccgggccctggccccggctggcctcagtgcccagcagccccgctccgctctgcccagcgcgtcccctttgctccagccctgcggccgtccctttcggccggcggcatggccctgtcgtccgaacccggtgagtgcgcgcgaggctgcgctgctgaccttgggccagccccgcggaccctgcggcccaggcgggaatcagcagcgccctggggtctgaaccgcggcttccgccttccctgctcgcagaggcggtggcgctgactccggtccgatcccttgccctgtcccctgttcctgtccctgtccctacccctgcctctgcggtggcccgagccccagcggcctcaggtgagcgggcagcatcccgattccctggcggcctagaatggaatcgcaaggtttagagaaattaagggacctgggacttgccaccctgggcaaagttcctaggtgcttgaggactggctggatgtggacagctgaggtggacttctacctggaggcgagggatgcactggatgatagggtgatgaggtcgtttgaggccttcatccttacctctttggctctctcccggcaagggaggtgtacagccttgggctctggcagtctgctttctgcccttgatcttctggtagctgctttgccagcagagctgctaatggctgttgtaggctggcagaggtccctggggagagttttgagaggccttggagtaggagaggcttgctaactagggtatcatttccccaaactgtatgtggctgaaagcttgatggcgacacatcagcaaaggagctgggtgaaagcaggcagcacaaggagggattttagcatggtcttgagcccctgttggctttccctcaggatgcagtgaccaacatttggccatcttcatggaaaagctgcctgcagctggaacctgcagaggagaaattctttccctggctgtgcagcactaaggccgagtgttagtggagccattgagccagacagacagagcctctgtcacttcacacctctaggagtgttgacagcaggtctggggtagttggcctggcctggctgcagcttcatggggcctggcttgctctgaggatgatggtatggggctgccctctctaggaataatgacacctgcataggtggtggctgggagactctttgacctctcagtcccatccttagctcagcctctgtcttctaaggttctcctagctctcagctaggtcaagaagctctttgagagatgaggttttttgtagttgtttttttttgcctctacactgactggatcactcttcaaatggcctcaaaatctgtctcaggtcttgaaaatgtcatgggcagataacatgtagccttcgggttaacagggagataccctttctcccctaaagctgcccattggcctccatgattcttccaccaagtataataatctcttagttcttctgtatgctggttgcatatctaggacaacagacaattgctttgggcttttgatttgtaaggaactgactggggcatgggaggatgagctcatggctggagtcctggctgtgtacagtcaccgagaagtaccattcataggggagaaggatgttcctcctcctgatctggcttcacatttaaatatgttttccttcttcctgcacccaggtaatagaaacttgggagagtgccaggcacatggtggtgctcaataaataaggttgaataaaaggattcagtgtctagataaaacttcatgttcattttcctagttcttctctctcgtatctgatatcataatgatgatgacaatgatgttggcagataatgcttataaaacacatactctatgccaggtaccagtctaaacacttcacttatgctcattgtcatggcaacctatgagattggctttttattatccacacttcatagggaataaaaccgagccacagaaaagttatttaacttgcccaaggtcatacaactaagtggtggaacaggattcaaatgcagggagtctagctggagttttttttgttgttgtttgtttgtttgaaatggagtctcactctgtcacccaggctggagtgcagtggcacaatctcagctcactgcaacctccacctcccgggttcaagcgattctcctgcctcagcttcccaagtagctgggattacaggcgcccgctaccatgccaggctaatttttgtgtttttagtagagatggggtttccccatgttggccaggctggtctcaaaactcctgacctcaagtggtctggccgcctcggcctcccaaagcgctgggattacaggcgtgagccaccacactcagcctgagtctacgtttttagccatacactctactcattcctgagattgccataggtggattgatctattataaatagctagttcacttgttcattgttttatgcattcattcattcaacaaatacttgctgaatgtcgaccatatttcaggtatggggatacaactgtgaatgagacaggcgagatttgtcatggagctggtatttagcaagtgaatcccctttgtccaactccttgtgtgagtcacacacacctcacaaatgagaagaaaaatgaacccctctatgcaagctcatgcctggcttttggggaggagagtgatatctttctttttctttttctttttttttttcttgagataaagtcttgctctgtcgccaggctggagtgcagtgcagtggtgcaatgtcagctcactgcaacttctgcctcctgggttcaagtgattcccctgcctcagcctctcaagtaggtgggactacaggtgcgcaccaccatgcccagctaattttttgtgttttagtagagatggggtttcaccacgttggctaggatggtctcaatctcctgaccttgtgatccacctgcctcgggctcccaaagtgctgggattacaggcatgagccaccatgcccggccgatatctttcttgatgagacataatttgattccgtcctctcctgtcttttagagtttgtaaggggtgcttaagtgataaaaggggatgcagtctagtctcgggcaggagaagcgggccctgtatctggttatcataaattgtcttgatgtttgttcgaaagggaaataaggctttgagcttgggatcagtgctcttcagtccacagagacatcttggctgcaagaagcagcaacaagttaggctcaaggtggaattgtgaggtcctgagaagagcttgctcttctgggacagaactgtatttttcttctaaactgcccatgttctggggagtcttcccgccttttggcttcagcaggacccttggtcattgttacaacctgtgtcatcttagtggagctgctgctggtttctgtctgaacccgatgcaatgggtctcatacctgtaaactgggctccaggaaggcagctttctctaagttggaaaatgaagactcaaggtggagggtgtttcccaaagccgataccacaagatattaataggtgtttttttcctatgacagcagttctaggatggtcaaataagtgcgtcgggttaaacaaagttaagcagctttctttactgcaggacttctcaggtgttgaatttgctagtagaaactgtgcatgaatacccataagggactacaggatgcagtgttttccaagccttctgacctttcatgttctgcagactgcactttgaaaaatgcttgtttagactaaggctagctgggatccggttaaaggtgcagaataaaattccctgaacgtgtcggacttaaatccttgggctggaatcctcccactgcagtccccactctacctcccctttccccaaaacactagcagaaaaagtcatctgcccctcctccttctggcagaatagtactaagggcttggatttttttctcatactgtaagttcatttaattgtttaatgaataaatattaccctccctctaggttgcttgtagcctgctggttgcactgtttatgaaacagctgtgaggacaggtgggccgtaatctctgggtagctaaagcccagcagcagcccgaggatcatgtgtcaaccctgtaatactgctctgtgcacacaggaattatgatgtgagctcagtaagacacaacctcacgattggacatgcggaggtgactcaggcccaagtcagggttacagctagcctcccggtaaacaactgacccatccttcctgrgctcttctycccaggatttcaacagcaccacagaaatagccattttgctcatggttatttcccaggaccacaggatttgcctaagtcactgggaggctatgtgtctgttctgagccttcccactctcctaaagggcagatgaagatcagagctttgcaccctgtgatgccattttaatcaaccctgcttggttttagaggattgctccygtgggtcacttgaggcaggctccaccttccccaggaggagtggcagagtccagccagcgctcggagctggaggcccacgtgggagcagtgagcggctgtaagcaggggagggtttggggtgggctccggtgggtcagttggggtgtactccttttctgtgtgtgtggatgggggtgggggttctggtaaagcttatcaggcttcgcagtcacctgtgatgtgggcttccttctgggaagaaaggaaggagtgggatggggctgtcagcttttcatcctagcctgcccctgtcctctgtccgcctctgtgctgaggcagttcctgctccctgagtctctgtcctttcctgggaaaggtggaagcagttcatggtctttccctttcagaggaggaggggatggaggggattgtattagcaactgggattgaagctccccctggcagttatggggtgcccttgggagggctgctttaggggggctttctgagaagaggcaggtcgggctgtacctgagaccaatccccttgataaaatgcagccaggcctgaagcacgttcagaacggaagcagcaaaggtgatgatatcgctcgttgctactcagctttcaggaggaggctgggcgttagagggaggctgtggcttatctcctgcagctgggcaggacggctgagtttactgttgtaaagaggaagccgccgctttagtttcctcttgtgagggctgtgaagagggccaggacactgcattcaggataccacagccattttgttttggataactgggattacctggggacttcagggctcttggaaattttccactcatatttcatattcacgagagaatttccagcccaggcttttcctgctctggctcactgctgctcacagatatgcaaaacagagacctcctactccagccggcagacaggacccagccagctgcacgcacgcactgactcagctgagcctcctgggtggcaggcagcacctcacccgggtgcatcacttgagtggcatcttcaggaccagtcatggagccaggctcaggtctgtgtcggggcttctgcaaggggagtctggcaagagtaggaaccagcttccttcgtataacgaggggatttcagtggcactgggcttcctttctggagggactgtggcaccatgaaaagttactgtttgttgaaactggcagtgttttagaactttctaactttgggacacttcttcaagttcatcagagcgtgttgcatgtaacagtgagataagctgtatcattggctgactgatgctggtgaattcacagctaagcctcccaagcctgctggyttcagctgacaaagggttggaagccaggcgtgaacatgcagctggagctgaagctctgcttggcatctgcagagtgagctttccttgtcaggcctggcctggcaggtgtctggagggtctgagaggagagacactctggagggacgggttggcaggtgggagctgtctgccaaggacatccagaaggcagcagatgtgggggcagctgctaaggcctgcagcaccccaagtgggttacttggtccatactaagatatggaattaattattttgttgtggwtgctgttgtttcttgcttttttttttttttttttgagagaaggtcttgctctgtcacccaggctggagtacggtggtgccatcatggctcactgcagcctgcacctccaggactcgagcaattctcccaactcagccttccaaatagctgagaccacaggtgcatgccaccacacctggctgtttttttttctattttttgtagagatgaggttctgacatattgcaccaggctgatctcgaactcctggcctcaagcgatcctcttcagcctcccaaaytgcttggattataggcatgagccactgcacccggtcttggaatgaattatctaccaactatttaagacactggtagtagttctgcggaagatttttatgggttctgtaaaacaaaaagggttctgtatgttaatgttactctatgatccttgattttaatgagccttatgaatgtgagttgaggggctgtggaatgcaacatctcccaataactgaccacaggacctgttttaccagcaacaggtatcaatttcttatggcatccagtttgggaaaggttgatttaagctaaagagaaaggaagatatgttatagaaagctgtgtcctgaaaagtatttttagttgattagagcaagctaaaaatgctttgtgcgctggtatgatggctcacacctataatcctagaccctgggaggccaaggcaggcggatcacttgagaccaggagttcaagaccagcctggccaacatggtgaaaccccatctctactaaaaatacaaaaattagccaggcatagtggtgtgtgcctgtggtcccagctactcgggaggctgaggtgggagaatcaccggagcctgtgaggtcgaggctgcagtaagctgtgattgtgccactgcactccagcctgggcaactgagaccctgtctctcaatcaatcaatgaataaatgcatgcttcatgagcaaacatggcaggatctggcataagagccctcagacatcaaggacttccctcccacccaaatacccattgccaagggagcctggttgggggtgtctgggtcaggcctgtgtgtgtctgagggcatgaaggaggtaggaaggtgctgctggtggtggatggcttctgtccagggtaggagctaacacagagataggtctgaatggtgaaactccctttggcctggcctctcaatagtgtgggttaggctgatcttgaactcttagcctcaagtgatccttcctcctcagcctcccaaattgcctggacaacatggcaaaacctcatctctaaaaaaaaaaaaaaaaaaaaaaattagccaggtatggtgatgctccctccctccctcccttcggcaattaaggagggagccctaattgccaaaacctgccagaaaaagaagtttgttttcctatttttctctcttttcatagagtcttaagtctactcattttctttctattctctttgtatttgttaaaaatggcattataatagcattcatcatcaaaataaaatatcctctcacacacaggcagccctgccacctggtcattttgactgcgtgaatctcttgcaggtcttgcccataaagggatgcattttcctttcactgtaaataaagcatgggtatggttctatgtattaattttttcatttactgtatttttatttttttatgtgattgcaccatcctcataatcataattctgattacttaacatctttttcaagtgagtatgctctaatttaggcattttaaagctatttatgtaaataatgcaggtaaatatccttgtgcttttcattcttaggattctttttttgaaagaaatttgtagaagtaaagttgcttagtcaaatggtatggtgctttatggcatttgcggccttttgcctgggctgttgggttgcatatcttcttctgagatgcgatgtgaggttttgggatggtgcccttgattggtggccttggaataaggggggaggtgaggatccagtttcgtttcagcctgatggagcctcctgggtctggttctttgtgctgttccagactttctctcccctgtcacctcctttgatggcctccagcttcccccctctctgctatcaagacatggaaatccccacaggcagctctgttcctcttcctttttgcagaggccaggcctcgctgtcttgatgtctgctccccagacagttgtgtgttgacaggctgttccccaccagctccctcccactcctctcatcagrgagtggcaggtccttgggtctcagagttaagggagccacagacctcactctgattgcctgttgctagcctgctttcttccttcctgtctgtgtcatgacttagtcccacatgccactcagactcagagcagcaagccctcctcaggcaccggaaatctctctggtacctagaattatgccacttagagctgagagggccttagagaccacttagttcaatccctttatctcacagatgagaacattgtgaggccggagaatgactgtcccaagatggcctagtgtgttcccctcccctgtagctgcacttctccctgctggacagcagcagggctctgtctcatctccattcttgtctgtctggtccacaaaaccacttctctctttaaaccaactttaaagaaactgtggtcataggtagatgggaaactcctcttccagagctgctcccaacgagggtggcttgtcgaaaagggtgcagtattaatccattccacaagtgttatgctggggactgtgaggagcccctgcccggacacatacgtggacaaagagaagcagcacagcatggtgggtgaggggacagaggcaggaaccaggtgcctgggttcagatccctgagctgaggatcagagaggaaagggatgagagagaaaggctgagaacagcacaaatctctgctgacttattaaaagtgtgaccctgggcatgttagctctctatgccttcattttctcatctgtcaagtgggaataataagattaactgagttaataagtatgaagttctttgcagagtatatatatgtatgtatacatatataaaatatatattatatataatatatattatatataatatatattttatatatatatatatattttatttttaaaattgagaygaggtctcaccctgtctcccaggctggagtgcagtagtacgatcataactcactgcagcctcaacctccctggctcaagagatcctcctgcctcagcctccctagcagctgggattacaggcatgcatcaccatacctggctaattctttaaatcttttttagggatgaggttttgccatgttgtccaggctggtctcaaacttctgggctcaagcagtcctcttgccttgacctcccaaagtgctggtattacaggcgtgagccaccacacccggccccagagtatactttttttttttttttgaggcagagtcccactctgttacccaggttggagtgaagtggctcaatcttggctcattgcaaccttcacctcctaggtttaagcaattctcttgcctcagcctcctgagcagctgggattacaggtgcctgccaccacgcctggctaatttttttgtatttttagtagagacgtggttttgccatgttggccaggatggtctcaaactcctgacctcaggtgatctgcccgcctcagcctcccaaaatgctaggattacaggcgtgagccaatgcgcctggccagagtgtacatattaagtgctatacaagtaattgcaaaaaaggaaagaaataaggaaatgaagaaagcaagcaagcaagaatgaaacccaaccaaccaagcaggtggttgaggccagtgactgttagtaaggaatcagtatgcgaggaggtggatagagaaagcttctttgagggagtgagttttcagctgggtaaagagtgttctaaaacctttattttatttgctgtgtcttgttaggaggttccagagggtttggaactgcaatagcagattctttctcttcagcaaaaggccttgatttatgtaatgaagaatgcagctttggatttcccagggctctgctgtaatcttgtgcgaccttagctgttaaagcctctgtgaagtgggggagtgaggtttgattattgttgcagctataacagtatcctcatagtctggaggagggagagctgaactctctcttgtcccttctcaaacatgggaacaaagtcaggagggcagggctgccaggtgctgcagattccctgagtttgggaaaatggaagcccacctagttgaacagttcattctttgaattttgaacacttgctttctcctgacacctaagtggccctacatgcttcacatccagttacttattgagctaattttgaaattggcatgctgggtttggtctggggcattcctaagtagacagctgaccccaagtaccaggtgggcctggccctcacttcagtgccttctcttccccggtgctggtgactcagggcatcctgcaattcatgcttgttctttctttgctagctgagatgccgcggcagtttcccaagctgaacatctctgaagtggatgagcaagtccggctcctggcggagaaggtgtttgctaaagtgctccgagaagaggacagcaaagatgccctgtccctgttcactgtcccagaggactgccccatcgggcaaaaggaagccaaggagagggagctgcagaaggagctggcagagcagaagtctgtggagaccgcaaaaaggtttgttcccaaggcatggttttcgtgtacatagagtcatgcagacccaggcaggctgtgggtgtgtgtcctgatatgaggcacctcatggggactggtatgtccctagagctgtgttggttccttaaccaagaccacttaactcacctcttatttattgagggatgtctcggtgcctctgttgcactgaaaagatcaaaacccactttgctgctgatgtgaaaaaatacacaccatttccaaatggcatttctcttttctttttggaaatttgaggatttcttaggagacagcaattgtatttcttctcatcacttgacaagcattttgcattactaatgaacacagcttactatttgccgggtgctgtgctgggactggagatgttataatgaacaagatagatagagtccctgggtctagacaataattaagtaactggacaaattaacttaaaaattacaagttataataagtgctgtatcagtcagggtccaactagaagatcagaaaccaatgaagtattagaattttaatgcagggaattggttacacaggtggtagagagctgagaaaccaaacaggggagagagaggcggctcagagattagacacagtaaggagcagctactacccaggacaggagtgacaaggaaagcagtagtgtttctggagccaaggtggagtcgccctggggaaggtggaactgtggtggactttccagtggaaactggagccaaggggaagaggtggcagctgcagagatgcctcccaaggcagagatggaggcaggcaatacctcgtttgaccctttctgcaccttccaggttctcccagtggctgccatgggccaaacctagccagaatcctgctggcacacttgggaaacacaggagaggatgaggaatggatctgagggcaaacaggcccaggagcagcgcaagtgctatgaaagagatgaataaggatgagatggggttaggggagagaaaggccgggaaagagagagaaaaaatccttttttagactgggaagtcagggaaggcctctccaaggagatgacatcttagcggatgcttcagggtataaagaagctagctatgtggccttccagatagaagaatcagctagggcaaaggccccccagtttcttccagaaggcccatgtggttagaggtctgttaaaggaagaagtgctgtgaccagggctggaggacttgtggggcccagatcagactggccttgtgctccctgataagaagtttggattggagtctaagtgaaatgagaagccctcatcctttcacagtttatctcaccctgggctttatcagattttctgcctgcccggtaccctgcaaacatcaatagttgacatggtagacctttgagccctctccgacctagtctgtgatcacactagatactgcctcagttttaaaggcaagtcttttcctttcttggttgtgtagaagctcgcattttcttaactcgtttggaaagaagtaaaaagttgactactggtgtaaaggcaagaacagagcttcaccactcataagaccagtgctttccttccttgaaaggatggtgagcccataaaggcaggagtcactggtgccattggttaacctctgagtgccagccttgtgttggataaggtggggtggccccagccccagcagtgtgctcatccctggagggtcaagaagagtatgactgtagagaccctcattcacactccgtgggtggaacagaagggctgacttcatcaagtgaatggtctgcagggccttctgtgtgttatgaattgagcatttgagacccttaacaatgagaggaaaagaaatcctggcattttttattactaggaacaataagtttctggaaccagtttccactacagagtgacactgggcctgacatctgctgaagcgactgtgctcttctcaatgcccagactcagggcaaaatggaagctttcttactctaagtcttaatggtgctctgtggtttccagaaattcccctgcaaacttctctccaaaaactttgttctgtccttgcctaggttatggtgtcttagtttgcatctgtctgcgccatttgactagacgctccttgaggactggatccattgtggaacttagttggtgggcagtggatgtctggcagaggaagacatcctgcctccccattgccaccatggacactacatcagggtggctgcaacttcttggacctctgtgttctgccactcactgtcatgctctgtgactttggggaaattaggaaacctctctgggcctcagcctcgtcctcatctataaagtggagatgctaacagctaccttcatggggtgttgtgaggaatgagggaatccacaggtaaaaggcttcggacagtgtctggttatagtgcatcccgagtaaatataagtgatttctctgacttcctgctgctgagacagggaacaatagcagctcctgccattgaatacttactatgggctaagtactagcctgtgtaggttggattcattctttaattctcacatcgagcttatcaaatggatattcttagtattctgattttgcagattagggaacgaaggctcagagaagttgaatttactttcacaaagacacatagtgagtaaatgacagagcaagaactagagcccatatcttttgaatctagaccccacacttcaaccataaggctatcccctcttcaggtaggggtggagtcttcggttccctggtctgtagaccctggaatgacactaggtgctgctccctagaatgtaattgttgcttctaaatgaaatggagggaaactggtcaaagctcccgctctgtccatcggcttctttcctgaaaaaaagcttggtccctggactgtcagatgccccagcatcctcctctggggtctgcccatacccaattttgtcttttagtttctcttctcactagaggtgcctttatatgtaaatgttcgaaagttaacattttcatggaggacaccctctccccagctccctctttgtctgtggcacctcccatcccatctcctatttattcttactttacacagaattctataatctggctatattgtttcttatcccgtggcagatttaaagaagcaaattagaagcagggagagagacttctacaggcagggtcacagaggtgatgtgtggtgattataagcctgggctttggggtcagacctattgggttcaagtggcagccctgtcacttactactgaatggccttggtcaaagctcttgactgcctgagctggtttcctaaactgcaaaatgagaataataaaaggacataccttgtgagaattaaatgagcgaatacacaaaaaatccttagcgcagtgcttggagcaccattaatgttcctgttttgttattgttgttattagacagtcaacagtgagagaggaaacaaaataattatgaaaagcaggcacaagaatttgaagcacagtagtttagggataacacacctctgagatcataactggataatacagtgatgatcctgggtcattgagaaaactttaaattatgttcagcatgctttgaggaagaatgcaggaattatgtatttttttaagaagccagataaaaattgatttttaaaaaattaggatatagttaaggctggcaagatggccaattaggaacatctccggtctgcagctcccagtgagatcgatgcagaagggggtgatttctgcatttccaactgaggtactggttcatctcactggggctagttggacagcgggtgcagcccaaggagggtgagccaaagcaaggtgaggcgttgcctcacctgagaagcacaagggatgggggaattatcttccttacccaagggaagccttgagggactgagcctgaggaactgtgcactctggcccagatactgtgcttttcccatggtccttgcaacctgcagaccaggagactgcctctggtgcctacaccaccagggccctgggtttcaagcacaaaacagggcggccattcaggcagacactgaactagctgcaggagtttttttttttttttttttttctgtaccccagtggcgcctggagcgccagcaagacagaatcattcactcccctggaaagggggctaaagccagggagccaagtggtctggcttggcaggtcccagccccatggagcccagcaaactaagatccactggtggccaggcgcagtggctcatgcctgtaatcccagcacttagggaggccaaggcgagtggatcacctgacgtcaggagttcaagaccagcctggccaacatggtgaaacctcatctctactaaaaatacaaagattagccgggcgtggtggggggcacctgtaatcccagttacttgggaggttgaggcaggagaatcgcttgaacccaggagaaggaggttgcagtgatctgagatcgcaccattgcactgagcttgggtgacaagagcaaaactccgtctcaaagaaaaaaaaaaaagatccactggctcaaaattctcactgccagcacagcagcagtctgagatcaatctgggacactcaagcttcgtagggggagggtcgttggccattgctgaggcttgagtaggaggttttaccctcacagtgtaaacaaagccaccaggaagttcaaactaggtggaacccaccgcagctcagcaaagctgctgtggccagactgcctctctagatttcttctctctgggcagggcatctctgaaaaaaaggcagcagccccaatcagggacttatagataaaacccccatctccctgggacagagcacctgggggaaggggcagctgtgggcacagcttcagcagacataaatgtccctgcctgacagctctgaagagaccagcagtcctcccagcacagcgttcaagctctgctaagggtgagactgcctcctcaagtgggtccctaacccccgtgtatcctgactgggagacacctcccagtaggggccgacaggcatctcatacaggagagctctggctggcatcaggcaagtgcccctctgggatgaagcttccagaggaaagaacaggcagcagtctttgctgttctgcagcctccactagtgacacccagccaaacagggtctggagtggacctccagcaaactctagcagaggggtctgattgttaggaggaaatctaacaaacagaaaggaatagcacatctaatcagagaccacatccgaaaatcaccagcatcaaagaccaaagatagataaatccacgaagatggggatgtaaaccagtgcaaaaaggctgaaaattccaaaaaccagaatgcctcttctcctccaaatgatcacaactccttgccagcaagggaaaaaaactggacagagaatgagtttgaccaattgacagaagtaggcttcagaaggtgggtaataacaaacgcctctgagctaaaggaacatgttctaacccaatgcaaggaagataagaaccttgaaaaaaggatagatgaattgctaactagaaaaaccagtttagagaagaacataaatgacctgatggagcagaaaaacacagcacgagaacattgtgaagcattcacaagtatgaatagctgaatcaatcaaacggaagaaaggatatcagagattgaagaccaacttaatgaaataaaataagaagacaagataagaggaaaaaaaatgaaaaggaatgaacaaagcctccaagaaatatgggactatgtgcaaagaccaaacctacgtttgatggatgtacctgaaagtgacggggagaatcgaaacaagtggaaaacactcttcaggatattatccaggaaaacttccccaacctagcaagacaagccaacattcaaattcaggaaatacagagaacaccacaaagatattcctcgagaagagcaaccccaagacacataatcgtcagatgccccaaggttgaaatgaaggaaaaaatgttaagggcagccagagagaaaggtcaggctacccacaaagagaagcccatcagactaacagcagatctctctgcagaaaccctacaagccagaagagagtgggggccaatattcaacattcttgaagaaaagaattttcaacccagaatttcatatgcagccaaacaaagcttcataagcaaaggagaaataaaatcctttacagacaagcaaatgctgagagattttgtcaccaccaggcctgccttacaagagctcctgaaggaagcactaaacctggaagggagcaaccggtaccagccactgcaaaaacataccaaattgtaaagactatcaacacttcgaagaaactgcatcaactaatgggcaaaacaaccagctagcatcatgatgacaggatcaaattcacacgtaacaatattagccttaaatgtaaacgggctaaatgccccaattaaaacacacagactggcaaattggatgaagagtcaagacccaacagtgtgctgtattcaggagactcatctcaagtgcaaagacagacataggctcaaaataaagggatggaggaatatttaccaagcaaatggaaagaaaaaaaaaaaagcagaagttgcaagtttaacctctgataaaacagactttaaaccaacaaagatcaaaagagacaaggaagggcattacataatggtaaagggatcaatgcaacaagaagagctaactgtcctaaatatatatgcacccaacacaggagcacccagattcataaagcaagtcttagagacctacaaagagacttagactcccacacaataataatgggagactttaacaccccattgtgaatattagacagatcaacgagacaaaattaacaaggatattcaggacttgaactcagctctggaacaagctccaacccaaatcaacagaatatacattcttctcagcacctcatcacacttactttaaaattgaccacataattggaagtaaaacactcctcagcaaacgcaaaagaatggaaatcataacaaacagtctctcagaccacagtgcaatcaaattagaactcaggattaagaaactcactcaaaaccacacaactacatggaaactgaaaaatctgctcctgaatgactactgggtaaataaggaaatgaaggcagaaataaagatgttctttgaaaccagtgagaacaaagacacaacgtaccagaatctctgggacacatttaaagcagtgtgtagtgggaaatttatagcactaaatgtccacaagagaaagcaggaaagatctaaaatcaacaccctaacatcacaattaaaagagctagagaagcaagagcaaacaaattcaaaagctagcagaagacaagaaataactaagatcagagcagaaccgaaggagatagagacatgaaaaactcttcaaaaactcaatgaatccaggagctgttttttttttgaaaagatcaatgaaataaatagactgctagcaagactaacaaagagaaaaagagagaagaatcaaatagacacaataaaaaataataaacggggtatcaccactgatcccacagaaatacagactaccatcggagaatactataaacacctctatgcaaataaattagaaaatctagaagaattggataaattcctggatgcatacactctcccaagtctaaaccaggaagaagttgaatccctgaatagaccaataacaagttatgaaattgaggcagtaatgaatagcctaccaaccaaaaaaagcccagaaccagacagattcacagccaaattctaccagaggtacaaagaggagctggtaccattccttctgaaactattcccaacaatagtttggagctggtaccattccttctgaaactattccaaactcattttatgaggccagcatcatcctgatgccaaaacatggcagagacacaacagagaaaatttcaggccaatatccctgatgaacatcgatgtaaaagtcttcggccgggcgcggtggctcacgcctgtaatcccagcactttgggaggccgaggcgggcagatcacgaggtcaggagatcgagaccatcccggctaaaaacggtgaaaccccgtctctactaaaaatacaaaaaattagccgggcgtagtggcgggcgcctgtagtcccagctacttgggaggctgaggcaggagaatggcgtgaacccgggaggcggagcttgcagtgagccgagatcccgccactgcactccagcctgggcgacagagcgagactccgtctcaaaaaaaaaaaaaaaaaagtcctcaataatatactggcaaaccaaatccagcagcacatcaaaaagcttatccaccacgatcaagttggcttcatacctgggatgcaaggctggttcaacatatgcaaatcaatcagcgtaatccatcgcataaacagaaccaatgacgaaaaccacatgattatctgaatagatgcagaaaagtccttcaatataattcaacaccccttcatgctaaaaactctcaataaattaggtattgatggaacgtatctcaaaataaaaagagctatttatgaaaaacccacaggcaatatcatactgaatgggcaaaaactggaagcattccctttgaaaactggcgcaagacaagtatgccctctctcaccactcctattcaacatagtattggaagttctggcaggggcaatcaggcaagagaaagaaataaagactattcaaacaggaaaagaggaagtcaaattgtctctgtttgtggatgacatgattgtatatttagaaaaccccaccatctcagccccaaatctccttaagctgataagcaacttcagcaaagtctcaggataaaaaatcaatgtgcaaaaatcacaagcattcctgtatactaataacagacaaacagccaaatcatgagtgaactcccattcacaattgccactaggagaataaaatagctaggaatccaacttacaagggatgtgaaggacctcttcaaggagaattacaaaccactgctcaaggaaataagaaaggacaaaaacaaatggaaaaacattccatgctcatggataggaagaatcaatatcatgaaaatggccatactgcccaaagtaatttataggttcagtgctatccccatcaagctaccattgactttcttcacagaattagaaaaaaactactttaaatttcatatggaaccaaaaaagagcctgtatagccaagacaattctaagcaagaagaacaaagctggaggcatcacgctacctgacttcaaactatactacaaggctacagtaaacaaaacagcctggtactggtaccaaaacagatatatagaccaatggaacagaacagaggcctcagaaataacaccacacatctacaatcatctgatctttgacaaacctggcacaaacaagcaatggggaaaggattccctatttaataaatggtgttgggaaaactggctagccatatgcaaaaaactgaaactggactccttacaccttatacaaaaattaactcaagatggattaaagacttaaatgtaagacctaaaccataaaaaccctagaagaaaacctaggacattcaggacataggcatgggcaaagacttcatgtataaaacatcaaaagccatggcaacaaaagccaaaattgagaaatgggatctaattaaactaaagagcttctgcacagcaaaagaaactaccatcagagtgaataggcaaccttcagaacaggagaaaattttttcaatctatccatctgacaaagggctaatgtccagaatctacaaagaacttaaacaaatttacaagaaaacaaccccatcaaaaagtgggcaaaggatatgaacagacacttctcaaaagaagacatttatgcagccaacaaacatatgaaaaaatgctcatcatcactggtcattagagaaatgcaaatgaaaaccacaatgagataccatctcacgccagttagaatggcgatcattaaaaagtcaggaaacaacagatgctggagaggatgtggagaaataggaatgcttttacactgttggtgggagtgtaaattagttcaaccattgtggaagacagtgtggctattcctcaagaatctagaactagaaataccatttgacccagcaatcccattactgggtatatacccaaaggattataaatcattctataaagacacatgcacacgtatgtttattgcagcactatccacaatagcaaagacttggaacccacccaaatgtccatcaatgatagactggataaagaaaatatggcacatatacaccatggaatactatgcagccataaaaaagatgggttcatgtcctttgcagggacatggatgaagctagaaaccatcattctcagcaaactaacacaagaagagaaaaccaaacatcgcatgttctcactcataagtaggagttgaacaatgagaacacatggacacagggaggagaacatcacacactggggcctgttggggggtgaggggctaggggagggatagcattcggagaaatacctaatgtaggtgtcaggttgatgggtgcagcaaaccaccatggcatgtgtatacctatgtaacaaacctgcacattctttacatgtaccccagaacttaaagtataattaaaaaaagaaaaaaattaggatatagagggaaaaattttattagttgaaaaatttggctatctaggacagccgcttccctagaatgttttgagtgaaattgagaaacatatgtgctttatgaattgagcatagcacagctaaagtgttgctaagtcacttcattttatgaaacttgtgaaaataagaatggggaactttttaaacattcaggatcattgacaaaggagcttcatttgaaatagtcaatctatccccttttaaagttagggagagattgggctgggcgcggtggctcacacctgtaatcccagcactttgggaggctgaggcgggtggatcacctgaagtcaggagttggagaccagcctggccaacatgtagaaaccctgtctttactaaaaatataaaggttagctgggtgtggtggcacatgtctgtaatcccagcaactccggaggctgaggcaggagaattgcttgaacctgagagtcaaaggtttcagaaagccaagatcaccccactgctctccagcctggctgagggagggagactctgtcttgaaaaagaaaaagttagggagattgggaagccgaggtgggtggatcacttgaggccaggagtttgagaccagcctggccaacatggcaaaaccctgtctgtacaaaaaatacaaaaattagctgggcatggtggtgtgcgcctatggttccagctttttggtaggctgaggcacgagaattgcttgaacccaggagctggaggttgcagtgagctgagatcgtacccctccattccagcttgggcggcagagcaagaccctgtgtcaaaaaaaagtaaaaataaaaataaagttagggagagagattgtaacacttaagttaacagatagtacagattgcacttcattttcatctccaggtctttagggaggaagggcagctgggaaggattgaggaagggagaagcgaaggtgagtggcaggagatgagtggagattacagtaggccaggaggggttgtggggaagggaggatggagaaagaaggggcaggtttccagaggagctcagggagagacagagggtggggctgtgagttttcacacctgattggctgcaaagtgttagaatcaaagttacacccacctggccaggatgctggtcatctggctgcatatgcggagtgagtgatctctgtgcgcccctgctctctctgtagggacccctgttatagtgcccatcgtgcagcatatttctccagataggctgggacctctggtctcaagtacagggaaggtgtcagcccctcttagttccctccttagatgggggtcccaattccaggtgagccaatgcaggggcagcgtgagcagcagcagtgtgagcctatggaagtggaggatgcctgtcccgcctgatggcattcagattcccagtgtttgcaaaactctgtgctggtttgtgacttctgattccaacctttattttagcgtaacaattctcatgtggaggggctgccagaatgagctgagtgtgcgtgggggaggagttcaaaccagcctccatgttctgaaatgtcccccctctgaccccattgctccactgctcccacccctagtctggattaagtgtctcctctggggtcccaaaatatccagggcatctcattacaccaaccacactgtatgataatctgtggaactgtctgggttcatctcagccatcacagtcggcccctggaggcgggagttatatcttatctactcctctacacccagggcctggcacacagtagtttattgaatgaagtggggtccacgtgtggcccccagctcatagtacacatatgagagcctggtgaaaggttggctccagtgcccctccctgcctagtagtcatctggacagaccacacagggcagtgggcttcagatggcccctggtaagatgctggctattctctaggagagcaaggtgggcctgaagggctcctcactttagcatttgagtgctatatagggaaggccctgggagcctgattccccagagcggaggagggctggggagtggagcagagtaagggaggggacttagtgactgtcaggggcaaccaagggccatagagcaggtggagcaccagacaggtgctgggaggtaagatgctgtaacaacagcccaggtgacctgatcaactctttgtcttgtgggcctggttagcaagaatgtccttgtgcgtcaagaggataaatctatttcagggatgacaaaactgctcctggccctttgagccctcaggcttggcctggagctggtgtcctcacagccccacactctgctggctccttggcaggagtgtgcttctgccaggtgcaagtgtgggtgggggaaggagggggtgtgccagctgtagcccagcaaatgctggcgccccaggggctagtgcaaggtgcagcaggtgagatagtggacagacagaccttggcccatcagaaggaagtgctttctaacaggggcaccagatcagttttgttcatacacacactcatagacacactcactcactgtattagtttgcactgctataaagaaatacctgagactggtaatttataaaataatgaggtataattggctcatagttctgcaggctgtacaggaagcatggcagcatctgcttctgaggaagcctcagggaactttgactcatggtgaaggcaaagcaggagcaggcgtcttacatggtgggagcaggagcaagaggcagcgagagtgggtaggggaaggtgctacacacttttaaatgcccagatctccatgaaaactctcactagaacagcaccaaggagatggtgctagaccattcatgaaggatccacccccatgatccaatcacctcccaccagcccctacctccaacaccggggattaacatttgacatgagatttgggcagagacatggatgcaaaccatgtcgcacaccctctgacacttacgcccacacgcccactcactcagctccaaccctctacctttactggctgggcctcggttgtatagaatggatgctagatatgggcctaggggaggtagaatttctaaaacggcccctgcagatgtccctccttaatctccagatgcagtgaataagatgagttatcactcctgtgatgatgttatggaatatggcacagttgaccttaagataggggggttattggtaggcctgatttaatcccatgagcccgtaaaaatagagagctttctgagtgtaggaggggagggcagagagattcaaagcaacagcacaatgaccactcctggttttggagatgaagggggctatgtgcagggattggagtgaggtcaataggagttgagagtgacccctggtcaaagccagcaagcagcctgggactccagccttgtgggcactagacctgaattctgccaacaaccggaatgaacttggaagtgaattccttcccagaaactccagacaagagtacagtgtggctaacatcttgattttggcctcttgataccctgagcatagagcccagccaagcccacccagacttctcacctatagaactgtgagctaataaatagctgttgttttaagccatcaagtttgtggcaatttgttctgcagcaatagaaaacaaatccasggtcatccttgggctccatatagcttttccaatttcctgagatacaagctgtggttaacttccagttcttccaagctcaaggggagtgagccctgaggagttagcctatctgtggttaaacctatcccttgtgcctacagagtctgagctcctggcccgcagatgctcatatgtgacaatctggagctcaactgaagaccaaggttgtcgccataatggatatccccaggaaggagaattctttgggcaccagtttgtgggtactagcttcctcactggggcagaagaacattcctaggacaagcctggtaggctgttggcttaggcagcctcccagcatttgggctgtagtgtttttttttttgtgtgtgtgtgtgtggtttttttttaaactttcttagctgttgctcaccttagatgtcacctgttgcttcttgttggtaggaccagacctcaggcagccttggctgaggcatttggaggtgaggttgcatggaaataaaaacagtgagctggaaggcatgtgtgagtgacacagaaaccagaatctcatgcgtcccagctgaggtcagaatgtgttggggagcccaaagtaatggctcttcctctgggtgtgggcattcaaaagatgccaaagggagaacctcatcctcaaggtgaatccgcctctgaggagtgactgacaaggtggcatccctggggcaggatgcttggctgagctccatttgatggaggacagaccagagaaagctgaggctgggggctcccagggctcaggttgagtttcccgaagcagtccagtgcatcacttagcaggaccaggggcaaggggaaggtaaattcctgaaaaggagccacctctgtcttgcaggttaaaatagccttgtcccaaagatgtgataacacagggtaggcaggtgagaaccagagggccatggcaagcactgggtgtgtaaacacgggaggagaactgtggttcttgaaaactcggcagtgaggatacctggccacaggccaagaggaagagagctgcttctgggtaagccctgaaacttatttggggatcaactgatttcttcaggcctgtaggtatcacactagtacctggagaggaggagggctctagtgggtcacagttgtcactgagtccttgctggtggctgtggttgtggtagaataaatactcaggaagctactgggcccatggcacaaggtagggcaggtggtcagttggtttctggcatttgacactgtgggatggcaccgtggggaggccgggttccactgggggcagacagaaacatgaggtaggagaagagtgctgatggcctcaccttaatgctgggtaatttttctgcagaagagacttgcagtgacataatctgatgtctgtttcatgaatgaggaaggtagagtcatcacaaatcagccttgcaaataagcatgggcttgtggcattttaaaccaaccttgggcccaagagccagtgtaatcatcttttggtgccaaggcaacaggtccagagggacctgaatttggtgccgatcaatccctctccccaaacagaggtacatatctgtgcctgctctagcagcggcagtcaggatggtacacggcgggctagaggagggagcagcagggctggaggctgggtggagcagccactgtgccatgggccgtgtgactttgtgccagccctttcccatctctgggaaagtgtctgtgagaagtaggctgatcttgcagatctccttggcacccagtaggtctgctgccagccatggggcctatgatgcctgtaagcttggatggcggtcgctagtccacggtcctgagcactgtctcgactcctttgtaaaacaaggagattggattcattgagcatccctctctcttctggctccaatgccccaaatgtctaactgtgtgaaatgcagtgtgattgtctctctgtgaccctattcctggtcctttctgagaccgttcatatgttgggactgagagtttgtgttatctgaagccagcatgctgtccacactgtggggaaagcctgcatgatttgctattgtcctcccctctagtgccctgtggttttagagcccctgccatgtggtctgccatttgtctctctgtctcctagggcatttgcctgctttaatcttctgtgggctgtgcaaacagccctgagcagtgcatggtgaccacaggtaggggtgtctggagggccgtgttctatctcaggcagacatgtgtaagaggaaggcatgaataattagaaacttcttaatggtagggccagcaccagtgattaatcatagcaaaattctcctgccacrcacacagcaaagagtctttatcactcaccccaattagcttctgatgtctcccacttttccttgtccttggctcttagaaagaaaagtttcaagatgattcggtcccagtccctgtctctgcaaatgccgccacagcaagattggaagggcc

SEQ ID NO: 5 - DNA, 96700 bp, Homo sapiens
attgagaaaacaaatctacctatttatgcagcatatttcgcccccttctgattcatgctgattaggaagcatgacagctggtgacagcagcaatacattacaaattgttacagagaaaaagcggggccaaatgaaacgtgatggtctatgattcacaatgaaaagtggtaaaggagaggcgagaccatggcatataacakggaaataattagttgaattagaagagaatggtaggaacaacaatgatttacatgaactcttgagtaattgttacagacattgttaagattcgatctatatttaaatggggttctgaaagttgttttactttaccttccagactcaggttggctgtgcttgatacttggcctacagcattaytagcaacaaacgtgtaagttccttcatcttctggataagcttcggcaatttccagttgataagtgtcttcaaattgagtcattctaaagaaccgagatggcttgattttcttgtctttgctgtaccacgacacttttagatctgcgacacaaaagaaaagagatacttcaaccacaaaaatgagtggatttttacaatttacctgcaaacacaatgttaataatactagtgcctacatttcatatttgacttaataacatgatacttttctctgggcatgccatatctactattgttaaatgatttcctttcatcttcaagaaggaaatgtaatgatagaaaaatatagcttgtcctaaggttgaactggttgtaatgtttaaaatgatagaacttcagttacattctctttagacatttgcatgtcatgcagtggaagcagagacaagattttgacatattcagtgactttgagaaaaagacagtcctaagaagagtcatcaggaaaggtttgatctgggcttgtagttgccttctgggacaggaaatgagaaaaatctccacttttggtttgcagaaaaatcaatcaaaaagagagctgagaagatcaagatatgaaaagtctaaaatagatacctttgaaggctgtagaaaaaaaatctctatctttgttactaatgagcaaaaggtttcagtacgcagtatatatggcacaaataattgtagagaaaataattttttaaataaagagggtgatttattatggtatttgagcatcttagatacatttgactcttttcagagtggcagttataagacattataataaagctagctatttctatataaggatttgaaccatcttaaaataatagaaagtaaaaacccaaattacagtaaagtagcaggttattgtgttgtaataattgtaggtgatatgcactttaattttagttaactgtttgaatagccaaaatcaaagccatcttgtttttggagcacagtcactataccacttcttggtctcaaaaccatccaagatgatcttctaatagtccaatcatctagcatttgtctgcattttaatgccaatacttgtctataaaagttactctcctgcccatgatggtagatgtgtataaatggcaggttctcctcttagagtaacaaatctgttcagttccttagatagtaaggtaaagtagaagatgaaatcctggccaggcgcggtgcttcacacctgtaatcccagcactttgggaggctgaggcgggcagatcacgaggtcaggagttcgagaacagcctgacgaacgtggtgaaacctagtctctcctgaaaatacaaaaattagccaggtgtggtggcacacacctataatcccagctattcaggaggctcaggcaggagaatagcttgaacccgggagggggaggttgcagtgagccgagatctccagcctggtgacagagcaagactccatcaaaatatatacatataaagaaaatgaaatcttgacactacaacttgtcagctgtgtggccttggaaatgtcatttaagctttctggattagtcttttcatttgtaaaatggcatgcgtaataatttatgggctattcgttgcatataattgctgtgagaattaaatgatataacacacatggaagggctttataagccactggcacaagtcagtcattatagcaagaatatctaacatcacagatggaagcaacgttgtcttcaataacacgccaaaagacagtgccatgtgatataacatgaaacaccacccctatttagtttgtgtgaaggggtgtgtgtgtgtgtgtgtgtgtgtgtgtgtgtgtgtgagatcatcaatggtacatcctcttacaaggttctctgcttatttctactgacagcttcttcctttggtgaactgaatgaggcaccaggatacacatgaactgccactggacatgaactgcacacaataagtgagttaacaggtaaaacttttcttggtagtggacttggtgcttgtggctgtgatgccatgatctgcgttactcattagcctctcgtgtcttctttgaggccattcttctcccatattactacttctgcaataccccacttgtctctcctgactgccctggctgagggcctcatccacgctctccaggcctattgtaataatctctctccagttcctgactgccagtcttgcctcccacatctgtccatcccttctttccctatcacagtatcacttctaaaaagtaaacctgatcatggtacccaggggcttaaaaatcctgcagtgtctcctaaatgtaaacaagatcaattccaaaatcttcagcatagaataccaaaaactttagcacggcctttgctgtattatccagccttcttacccactcatgatatcactttccaactgtacttaaaccacttgcttctagcacatgaagcattattgcaagttttgatgacttggagatgttgttttctcatcataggatgccactgtgttcaatgatcctacatatttttcaatgctcagttcacacatctttctctggctctctcccagacagagaatgatgagtacgtgggcctgttaatagcacttacaaccttgggatatagttgtgtgcatgcatctcctcacctacatgtcaagctccttaaaggcaagagcaagatctgcaccccagcacctagggtaatatctcaatagcagggaaacaataaatggtagaattaaaattgcacagatgcttaaatgaataacagacaatatcattgttaaactaattattcatcatttctgtttagctagctgtcactctgtaagcctccaaatgacactgactcatcatctgtagaataaacagcaaaaaaatagcttttttacattttaagattctgcttttccaaattactcctctaccagtaggtggcactggagaccttcaataggtaacattttcgctgttagaaacagcacctggttgctcagggccacgtttcatgcttcagaaagtattacaacccccaagaacatgggagcttctgaagactcccaatttctttccaatttgtggaaagcagggctacacttacttaaggcaatacctggccagaggaagttctgtaaatatttttagtcccagtggtatgaaactatgtgagttggcaagtttttgaagggtcattctatttaatgaatttaatttctttcatatagaaaacaaatttataagaggatgctaaaaccactatatgtgtacagatattaccacacataggaagttaatgatcttctcagtttacaaagcctattcaaacctttttaaagacattggttatgcagaaaagatagtgaaatttttctctttctaccccaattggtgtcttgtagagtgcttcaggtgtatttctacaacactttaaaggcaatactaccatatgttaatatgttatagacttaaaagcactataccaatatagttaagacaaatattactactttgaatgatgtacatatatgtttatattaaaaaattcctctaaaaattaaataaatggataaattatttagtgtagctttaatgaacttgcttttaaaatatattttgtattattgtgttagtaggatattatcaaatcagtcctcatttattaatatttagcatttcttgaacactatccctcaaatatacagtctatggtatttgtccatactggccatacaatactaaacattgatgtttatataattcctctctatggctataataaaatgaatgtattgagccccagttacctggcagccatgcctataggtgctttacatacattatatcttttaattatgctcataaaatcaaataggtctattagatttctagatcaccatctccattcctgaggaggaaataattgggtcagaagaccaactgaagtactaacctgttgagaaaaataaatcttgacaaggtagagattggattataaactaatgggagaagcataataaacaaaacaatacaactttgcaattacttttgcatcagcctaataagagggctgggagatgcccaagctttgagagtttccctttggctgggaaactctcaaataattgtgattatagacaatcagttatgacttgaagtggttccacatatattgtctcattctaccaagatcagattcctgggatgaggaaattggctggtggtacttgagaagcatgccccaattaaaaatggtagcagctaactctgattgattactgtatgatgagcactgtgctatgtgctgacttgagttacctaacttaatcttgataataatcttaagtgtttggtaacagtcatttaaccatcattaattagtccagtcaacaattacttatggagtatctactatgtatcaggtgatattctggggcaaccatccactcttgttttcatagagcttaccttctagcaggtactatttttcagatgccaaattctaggcactaaaacggaattcctagcctcataaaatatattttctaggattgaatgcaatcatatactcaatgtattcatgacagaaggagaacgagagacatgatatatattgaaggcaagattcaaattcagcatctttgacaatgaagccccgacttttgaccactataggatattgtcttccaaaggatacctttcacacaagcattgtccatagactgaataatgtcttatataaatgtattattcttttgaattatatgtagatgctattataatctaataattttagttttgtcattgtattttatcaatgaagaaattaaagtgcagctacaatcataaagggaacatgaccttttttaatattagtgaaaaacactaatttttttattgtgataaasaacacataacataacataaacaaccattattaagggcacaaaatagtgaaaaacacttatctaattcttaatttaataattgaaataagttttctgttagatttccattaagcttcaaattatgcatgagagatgtttgtgatggaggagaagctgacagaatgtttttcccatgtaattatttgtaagtattggcaatgacaccttttgttcttaaacctacctgttccagaaacccggcattgaaaacgggctggctgcccttcagaagtgacagtgtcctgaagcggggtgatgatggcaggtggataaacaggcatttcctgatcaggagacacaacttctggaactaaagaaagaaaccacaagatttgtcatgattaagtcaccatagagacctcacagaagggagcatgtaggtttatcttaatttatttcactgcagagtgctttcaaagttgggtagcaatctacttttatgagctccaaattgtatttttaaatgcactgggaaaggacaaaagcctgcttcttaggttttattttcagctggaagtagcgaggcattcctaccttccactgagagtgaagctgatgttgtggcaacaccatagtcattcttggcttcacaggtatagactgccgcatcctctgggaaggcttcaattagcaaaagcgtgtattcttgcccatcatgaagaaatttgcacttgaagccagtggaaagcagctgctcttccttgtaccaggaaattttgggctgtggtcttccggatatcayggcacagaagcgggcaggcttgccagactgcacagtgacaggctggagctcctgcagaacttggggcggttcaggagctaggagtaaatgttgacaaatagcccatgaaaaagtgtaaaaacacaagagagcatgcaaaactctacattaatttgttgctggctagttatacatccagagacaaaattttggaattgtggtatttttacttgcctcagaatattagaacattctttgtgctaagaatgaagaaagcacttggaatttgtccacatgcagagggaatagcttcagaaagatatttttgatatttggggggcatgctgagagtgccgagttaacctgattatcccagtttctgtttgtggtgggggcttagcgatggacacctgaatgaattatacaataacttccgtgtgctacctatttttaaaattcatttggacaaatcatgtggtgaagaggctcatatcattccagtttgtttgttttgcaagtatttgtgtttatgtcatagtcattttgttatgtaccagtgccagtaaaatgcaatcagtaagtattgaatgaatgactgaattaacactatttcagatctagttaaatgccattaggtagacttaacaaattcagctttcctgttttgctaactaaagcatattctcagtgctgtgatgagtgaggggacctggttagttcatggaacccagaaattagaagaaatgacttctgtgaggctggtttctgacactatcatagaaaagatctttacttttctgtgcctcagtttctccwctactaatacagagataataagaactggatgccatgaccatttggtcttctaggaacctagggaatgctggcgatatggttcatctttgtgaatcttgagattacccctggagttcctgcatctgcctcaggggtattttattcaaagagatatggcctaggatgagaataggaagggaggttccatttttctcttgcatctaggttagactcaaaacaaggtcagcttgagattcagccttaagatttctaatgaggagagcagaggtttaacagcacttccctggggactgctcagaggctcctcaggagtgcttggtagcatgtggaattccctgtccaaagtaagagcccctgttcttagagcttggggtagagaggatcgagttccacattgcctgaggctctctaggccttccagggtctcaaagaggacttttgagttctcccaggcactccatatcagaggctggaaacacccctttcacttggtagtgctgctaggacttgagcagttcaggcagagggcagagaactaaaatagtttaacagcgaatctagaagctcatctggggtatatgaaaatggacacccaatgggtgttcaatagttttgagcaaccagatgaggatctggccatcaggtgctttctgaaaataacttctcaataggtcttttaacagctgccctcccttttccatagatataatgtgaaaaaaaatgtagctggaaccacatgaataccataggttctttagaaatttccttcaagttacaagaatttagtgacttaaacaggaggattatttctgatggatccacaaaatatgctgaaatctgtccctacataccattgacatagagagtgacagaactcctgttccttcctgccacaaaggtgtattctcctgcatcgctctgtctggtctcagagataaacattcggtggattcttctytccactacatatttgtgtcgttcttgaacttggaaattgatttcaatgccatctttataccagtgggcatcaacatcgtcttcattgacctcaaattcaacaacagcacgctgtttctcaatgacctgttgatggaacaacataaaamaacaacaacaacaacaaaaacttgaagctctggtttcctcccagttaatcaatttctaaaactggtcaatgaatggcatgtgaaaccaatatattataatgtaataagttggctgattatagcactctctaatttttcctgcctagtattggacaaatggtacataaacttctcttgtagagaattgtgtttacagctgcatggaggaaaggagctgccccaaagagacaattatttcatccttaaatgtttgcttcttatttactaataagggatataatgatgctttacctttgggggctttttattgtctaaaaagttattacttaatttgatttcattttatatgaataataactttgtgggctaggtaggaattattatcctcattttaagagtgagaacactgaggttcagaattggcaaataaatgatggaagacatctccaggttatctgagtcctcattgaagcctttttcattatagtccacagtctgtaaagcctggttttctttggatgagcaatatgataaagctgaactcaactggtatttctctagacatgtttcctccattatatcatttgggatggtggacacttatgaggacaagctctgtaaatgcagccgacagcaagagtgcccagcatccttgccaggaacccagcacggcttggacagggctttctcttagacttcacagaaagtatttctagccactaagttccttgacacttgcctctccacagatagaaaccttctgagaaaatatcaccttgttctaaatttccttaattctaattgatgtgtgaacctcacgatttacattttaattcttttctggttggtgctgcttggcaagcagccatttattagacagtgaaatttctacagctgctttaattaacgtatttagacagctgctagggacacccttattccctgagtggaaactgtgactaaattgaggtcagcataagagagtctaagccaagtaagaatgagctgatttaattctttaaaggatggtggttagaaaatgtaaaagggaaacattaaaatataaaatgatagattatggactactgatgatttttcaaaacatttagtatgtagacaatacctgaacctcctttttaatacttcggatgcgaacatctctgccttctacaaagagttttgcagttgacacgttgcctcctgccaccactgtgtacttcccagcatcagacatccgggtggatgggatcagaaggcggtggacatatttctccttctgaatctttattctatggatgaaatggaaattcgagtttaccgtatggtgattcagaggaaactgggaatyactggaatgtagcaagacaaaacaactgacctgtctgtgatctgcagttcctggtcatctttcatccactgtacagtgatgtcaggttcagaaacttcacattcaaacatggctcgcttcttctccagtaccttaatgtccttaatgtgtttcctaaattctatatgacgagctggaaaatagcatgtagaaaaattaacatttttaacagctttattgagatataattcacatactgtacaatccaccaatttaaagtatacaattcaatgaatttccatgtattcatcattgtgtagccatcaccataattttagaacattctcattccccaagaagaaatcatgtaacccttagccatcaccccaaggacttttctattgtctcccctgtagacctaagcaaccaccaatctacatctctatagatttgtgtatcttggacatttcatataaatggaatcatacaatatgtggtctttgtatggtctctggcttctttcacttagcataaagttttaaaggttcatccatgttgtagcatatcgtagtgcttcctttttattgctgaatgatatcccatcgtatggctatcccacattttatttatccattcattaattgatacactaaattttataaagcatgtatgacattttttctatggatctaatatgtatgaaaccataccttccacataaagtgtggctgttgatgttgcttttccagccacaaaggtgtagtcagcagcatccccaaagtgaacattcctgatgttcagtgagtgtgtgagctttttggttctcatctggcacttgtcagttgatttgatttccacaccattctttaaccatttgtaagagatgccttcatagttcactgtcacctcaaaagtaatagtgtctttttcttcagcgttgatgtctttcagcatggaagtaatcatgattgctgcaaaggagaaaagaaaaaacacccaaggagactttacgtaaatatgatgtgggttataacaggtgcagaataaaaatttggaatgtttttagtgcgtctgttgaggagattacagtttagagatataagctttgataccttccatgtactatacaggacagtgccaactcacagaggaacagaaagatcaagtgatagacactgaggcatctttccaggtagcctttcaatgctactctaactggaacattttatccaggtggagatactagtgctttactcagtgtaaccacatactagatgtttcaattaacaattttttttctttattttttgaggcaggttctcactttgtcgcccaggctgcagtgcagtgccgtgattgtggctcactgcagccttggccttctgggcccaagcgatcttcccacctcagcctcctgagtagctgggactacaagtgtgtgccaccatgcccagctaatttttttttttccttttgtctttgctagaggcaggatctcattgtatttcccagcctggtctcaaaatcttgatctcaagtgattctcctgccttggcctcccaaagtgctgggattacaggcttgagccaccctgcccacccaatcaaggatttttgagtggtcagcaaagtgtaggatatagaatatcaatgaatctactgaatatttgatattttatatatatgtgtatatatatatatatattttttaacttacgggtgactgtcagggtggcactgacttggtcattgccacagacaaatgtgtattctgccgagtcctctgtgctggtgttcatgatgatcagctgatggagttttccctgcacaactatcttgaacttttcactcatctcaatttccacaccattcttcagccacatggaagggacattgaagtgggacacctcacactcaaaagaggcagttttggtctcaggcacctcgatatttttcatggtttttgtaatatgtaatgcttggtaaaatcaaagagcacttcagttaatacaatttgtttaaaaagtagatgaaaccaaacaaatagatacatggggttcattaaggaaagggctgtagggggctgcctgatacttactctccacaaacagttttgctttgcattccaattgcccgaccacagctgtgtattccccagcatctgagggggagatgttctgcagcatcagcttgtggactttcctttctgagaccagtctgtgtttgtcacttggcttaatttccacaytcttatggaaccattttactggaacagtgtcatgggaaacactaacttcaaaggcaacagtggcattttccaaggctgtcacatcctttggctttttaatgatcttgacagctaagaggaaaattggagcaattcagtgatagggttaacttaatggtaaccatgggctgactgcttgaaaagtgtttctaaatcaacttactctccacgtgcagtctggcactggctccaagccttccaagcctgaagccataaacagactcatccacgatggcacagtttttaatcctcagagagtaaattgttcctttgacagagatagcatacttttcattggattccagcacaactccatttttgatccactggacacctttgacattagggtgtgtaagctcgacagtgaaaacagcatcctgtgtttctgtcactgtgaggttcttcagagtcttcttaattttgacagctaaagacaaatttatgattgggttagaaaatatagatgacatcatcaaggaaaagaagtcctgaacaagatcattgcttactcaccctgcaaaagaatggctaccaaacattttacagttatgcagcacctctgttttaaaaaacacctgagattatttaggggaacctgggatccaactggacatgtacatcgtgaaatgatttttctatgctttagtagtatgaagtttgcatagctatgtattagcagcataatagactgattggagaagggtgaaagacgaatggagaatcagtgtctgatttagctgtttcacagagctttaacctaagaaatggcttttttgcataaacgcatttgataagcaattttgtaccttgtggaatgtgtctcaggaaggtttagaggatctagaatgactttatgaaatgaaaatttatggtayccaaaatggccatatcgtttgtcttttaaaacgataacgatcaagattgtaatatgatttgaaaaggacaaatcctatgttacttgccttcaactttgagtttggcagatgttttggaggtggccaccttgtaggtatattctccaatgtcatctaatttggtggcagcaatgataagtctccttttgtggccatcagactcacttctgatgttgttagtcagtggtaggtgtttgccatccctcaaccattcgcctttggaatctgggttggcaacttcacattcaaacacagcttcctgggattcagctacggtctgatctgtgagtggcttggagatggccccacctttggaacaagagatgtacagtatgagtcctttaaacatattcacacaatgggaaaawctttgcagaagtaaatataaaatatcaaatttaagaacatgattttgaaatcatgaaatgtctatgattgtttttacccatattgagaaggtaccaaagaaatcccttattctaagtatgcataactgataattaggagaaatactggaatcagaaaagttttgtgaagaaaaaataactgttgaattaataggaaattcttagaacagtataccaccaggatagtctctaacccaattccttcttcttcaaaagcattttacttggtcttttaatgattatttcctgggaatctgatattttgactacataaaaatttgctaaacaaaatgtacgagtcatcaatgtttctactacattgaggatttctatatattaaaaatcactgtgttggcaaatgtcgcccattctatgaagtttcaccccattgcctccactcttatcatccattagcagaaataattactgctttaacaagctagttgcttatgtatctgtcctctctaaattatgaatttctcaagaaaaaaatcatttcttatttagttttgtgtcctgagtttctacaagtgtctgaccaatggtaggtactttaaaaacactgggtgaaatcacagaggagttcatagtttattcctgtttccacacatttaaaacatgtaatttatattaaatgtataaaaatgctgaatctgaaattttgttttacaagtcttttcatggtcygatctctgaagaaatcttataacgtaagtaagtataaaccatgaaactttcataccaaataagacaaatcattaccatatgacttgcttcaatactagatgtaatggacaacacgatctgaatgtaacatctcaactcctcaaaatttaaactgtaatgaaccaaacaaattaatgatgacttctagttttttctggcaattgatttacattttttattcttcattgtaaagctaagaaattctactgaatgatggtcttatttctacatgatatcataagaaatacagttacattaagctgtattttgaaaatatttattgatttcattaaaaagtaggaagaaaataaaaggcacaaaggctaaagaagcaagaatggctaaaaaaggaaataattctttagagtaaggaagtttaaataaagctcaatacagcaaacaccaattgattatctgtcatttgcaatatattggaatatacaaatagaattccagatttcaggagtttatacactgatattgaaagaggaaatggggaataagacaagtgcataataaacactaggaaagaggcacatataaagtgatcctggggttggatgaggaagagatcatatacaaatggagagattaaggaaggtttaatggagaaggtgacgtttgaggtaggcctagaagaacatttgtaatttaggctggtgggaatggtgttgcaagtactattggctttgggaacagcataagcagaggcatggaagtgggaaactgaaaggaattttgggggaaatgaataataatttcttaaaataacaatcactcctcgtaagaatttaggttaataaatataccaacctgccacagtaagttttccagatgtcatattttctcccgcgtaaaatgtgtattttccttcatcatctttcatcatatttagaactgtcaatttatatatttttccatgtgcttcaattttatatttagaactgggcttgatttccttgtccttaaaattccacaggacatcaattccagagtgggacagctcaacctcaaacaccacattttgagtttctgtacaggtaaggtcacgaagacctctgataattttaatttctggggaaaaaataaaataatctcttggttattgttacactgggaaagtagaatgcttaaagtaattattagataggtagaataatccttactttctacagagagattacagttggtttcaactctgccaactatcagcttrtaaggtccttcgtctgaagcatgagttcggttaatgactagtcgctgtttagtacctttcacaatggcctgtacacggtcatcaggcttgatttgttcatcatttaagtaccacttaacagaagtcacatcagggactgacaccttacattcaagcacagccttggtgccttcaatcacattaacatcttttagaggtgttatcacgtccacacctgcaaaatcatacacacacaagatgaatgaattttgttgaaattgtctgctccttgaagttctttatgttgcttaatagtgtaaacataaaattttataattaggactcactatagacagagacacgcccactggtggagaggccaagggctggaatggtgaaagagtaatttccagcatcttccttagtcatgtcttcaatgagcagcatatgagattgtttgtctatcacaatgtgaaccctgtcactgggctgcacttcttggccgtctttcatccagacgccttccacactttccaaggagactttaacttcaagctgaacaatgtcaccctcacagactttttggtcactaagtccttgtaggatagcaatggggcgggctgtgaaatatggggagaaaaagaatgttatgatcattttttatcaataaaccataatgatgctcactgcaggctgacaggaatgggaggacttacgtttcatctttaatttacaggttgtctttttcccgtcgatgacaaagctgtattctccctggtcctccttggttacatccttgaccgtgaggttctgacgtccacgacgagatgtaattgtatatttgccattggatttaagctccacatcattatgataccattttccttctatattttctggggatacaatgcactctaattctcctgaatatgattctggaacttctatgtcctgaagttctttcacaaactcaacaactgcacctgaagtgtataacagaaagataaatcaatttttttggagaggtatgcatctagacttaggatagagatgatgtcttgtatgtcttttatctcccccatactatcaggtgtattcttaatatctacccgctgatgggctgagagataaattttcaataagaagcagttattttattttaatttttaaatatttttgaaagtaaagaattatgcttcaataaaaaacttaaaagctaaaaatcaagataatactactttaaaaaatccaaatggtcaaattgttaacattcttaattacgaacataaatttatgattctggctatgaaacttatagtcaatttccaaataattgtttcatgaaagaaaaattgcatagctaattttaccacatgctaagggtgactttagagcttaggtaaacaatgaaatccttcgttgttgaataccttcaacaataagtttagcagtcgttttgacattttcatcttccacaagtacacagctgtaatcttcagcatcagacgtatcaatggtcagtatggagaggaagtgaacctttctgtcagagtgcatcctgtatttatctccctcatgaacctccataccatctttataccatttcactttgacaaatggttctgaagtttcacattcaaaggttgccatagtgtctttttccttagcaacaacatcttgtaattcctgtgtgaaagtgatcaattgcttggctacaagaaaaaggtgggggaaaaaggggagagcacattatattaaattaaattctcaacctgaggaatggggaaagaaaataaaagtaaacacactcatggatattcttgaatacaaagacaggtccatcaaaggaaagacatgcaaattaccttggacaagtaagaatgcgtgactggaggtttctccagctatgttgatggcttttaccatgatgctggcagagtcctcagcagtcacatctcttatgaccaattcacaaacattgtcttcgggccagtaccagtagatccggtcagaccgttcaattttgacaccatttttgtaccattcacattcggggtctggtttccccacgactctgacccggaagtgtgcatcagatccttggcccactgtttggctctggattctttcgaagatttttggagcctccatactaggacttagttcaatcttgtcaggtttaaaagttggaatcgtgattttgccttcttcggcaagagctttcttttcctcttcagttaactctttggtccagtggagaagttcatcttttgtcttcctgaggagttcctcataggattcatccttctttcgagacttgagctccacagcggtaatggcttcataatagccctcttctgttctgcgcttgaatttactgcgcagctcttccgactcttcaggcactttttcatgggtaattctttcagcccttttcaacttcacaacttctttggtttcagtggtgtcaacaggtctatccactttttgtacttcaaactgaagctttcctggttcatgtacgtgaaactcaggccttggttcaggagctctcctaaggacagacctaaaatcttccctctgttgaatctcaagcttcactttatgctctatcacaccttcaggattttccgcggtgaccttcacttcacctgtgtcatatgatttgcagtccacgatgtccaggtaatggataccatcatagcgaactctgaaccttttgcttttgcggatgagctgtccattgaggtaccagttgactttgggctgagggtagcctgttaccctgcagcggaaccttgcagtctccccttcaagtactctaactggctctgggtacaagacaatgtctggcttttgcttttctttctgatctgttgttacacctgtaagtgcaccttcatgagccattctctctaattcttcaattctctgtaagcctttcctcccctcaggcaattgggattcttccacaagacttttctcatctttaacaataagggtagcagatgtgtgatctgttccatatttgttagtggctctgcaagtaatgataccactgtctctagaatatgcaacgccataatcaaggctgcagtacccaaattcattgatcatacggagcctgttggctgcttcaagtggctttccatcatggagccactccaccaccatcgttgggtcaccaatgggtgttagcctgcattcaaagtgggcaggcccaaagcgcttaagtcttaaggaagtgagttttttcttgaaaaatggtttctgttgtttctctttgtcatagagatcaccttcttcccattgctcttggccatatcgcaaatggaggggctccagttctggggctgcaatctcctttgctctatatgtcccccgtgggatgattaactttctctctggctcaggctctgcaaactcaacttcaacatttactttgcatcttgtagtgtctctgccagctttattaatagcagtcgcagtataccaggcagaatcttggctgacagtggaatcgattttaagggcagcttctcccttggttccttcaattctataaaaagttgggggagggaataatcaatatagtggtatagcttccctggttattggatttgtataatgagcttagctttattatttccatacttacctgattttgggatatttatgaggcacaatgatgtcactgtttttcaaccatacaatgtcagggttggggttacccgtagctctgactttcatttcaagtcgggaaccttcctttatattgacatttttcagtttttctacaaacatcggttttacctgatgttccacagctgaaagagaaaggtcatgatttagagggagtaaggctgaaatacctgtttataacccaagtgataagaaaattcatttatttttattttatctcattttaccttccacagttaaaatcactgaaattgaagatctgcctgccctgttttgggcaaccacagtccattccccagaatcactgggtgtggcagggacaataattagtgattgagtaccatcttctttaatgactactttatgggtatagtcattgacaatttgctggcctgtgaaaatatgtttaaaagaaagtagattttaaaatagtttttaaaaattgttagatgcatacataagcttgtttttgtgtttttatgattcatgagcaaaaacttatcacgcttaccatcatgaaaccagaacgtctctggcataggtctaccaacaacctttaagtcaaatctggcagtttgcccttctaaacatttgaaagaaacaggttttaacacaaagactggtttatatagtctctcaagttgtgactcatctgtctcctccagcctacgtccaggggacattcttgcaggggacatccgtgcaggagacatccttgcaggtgacatccgtgcaggagacatgcgtataggagacctgctcactgaacgtggagagagagatctgcaaaacaaagacacacaatactttcgtgaggcataaagaaaactcagcaaaacaaacttcattttgtcttattcattattcatgttattttagaatttacttcttgcacgtattagaaggcacctcaaactcattcagatctaaaatagaatatattattgttgcccccacaactatgtttttcctatattctcaattttagctggtagtcattcagtatatccaggtacccaggctcaaaaatcttggaataatcctcaatactctcttttccttaccacttggatttaatcagtcactagacttttttgatttaactactaaaacatcctaataaatgttggttggataagtaaaccaatgaatacatttatggaaaaataaaaaatacacattctttatctcagaggaggaaaacatagaaatgaatttggaaacaaaacaaagcaaaacaagactccatctacacattgcagccagactgacttggagtttgaatgctggcaccaccgcttacaggctggatgaattaagacaattttcatagattcccagggcctcagtgttcctatttccaaaccaataatagtcatctttttattgcagggctgttgtataaatttacatatgtaaaaatcaggtgtcaaataagagctattgtgatattagctatagcactaggaaaataaacagtatgttacactgatgaaaattctttgctcatcttacacaggggcaagaaataaaaacttctggcaattgttggtgttgccaatggtaagtttctgtgccattttagccctcgattttcttcttacacaatagcaatttgctactatttgatgttttgaaaacaatttacatactaaataacccaaattattacaagtcttacctgattctgctcactggctctagtgtgggaatgtaagtcggagctccaagtggtgcagcaggctccacatacaatttccctgagcaaattgcatttcctttaatattgctggcaaatgcagtgtagattccttcatcttctggaagaacaacaggtatacgcagactagctctgccatcttgtagaaagtccatttggtatctttctccatgtttgatgcgcttgccatctttgtaccaagcaatctgcaaagaataccatgcatgtatgaataaaatttacatcaaatagttatattttaaccaatttgtatctttactgtggcaaggagctatgataaatgtttatattttacctttggtaatggatatccagacatcttgcaatgaaaagtgacacccatcccctcaagaattctataattcttgattcttraatcaaatcctgattcaacagcttcagattcagaaatgtcaactgccatcttttcttctccatcttcttcaagaagttcttctaatgtagtctttattattctatattcaatttctttaataagtctctcttcaaaggaagaaatatggaattcctatgcaaaaagattatggtctgttaaaaatacatatccttactgatataaattatttaaggagatgtatctgagctagactgttgaagtttttagctgggagaagaatctagaggactttttggtttgtttgttttaatctgcattatggtcatctttcccagtgaatgttgtggcatcttgggtagaaaggtattccaaaagcaggagttagatttgggttagaggttacattagcttatcacacagatgaagagatcttggcatgaatgaactcagctgtgctaatattggtgttttccttaatatattataagccctatttttaaagtcacatttatggcctatatgtaatctctatttctaaactcacaggtgcaacataccatgaagattaaggaaacttagcaacagtgaacttggaccttctaatagctgtctaaccccgagctcatcacttgaaaatgaaaatatcaaataaaaaaaggaaagtataatttatgaaattgtttggttggtcattacttttatactcacctgatcttctacataagttctgaccactacagtatctttggccattttcttcctaattaaggcttgttctttttcatactctttttcatactcagagtatacaaatccaggtgctgtttctccaactttaggttcttgaacaaatgcagtcacttgtgtctgataaagcatttcttgctgggacttcatcagtaactcataatcagctaagagttaagaacatcagttaatttttaatgctcttattagaaaacagtcataccactatgcattcaggtaaactctacactggggaaagttgataaccaaaaaccaaattttccaaatatctactattgaagtgctcaatattttctagatggaatttggaaaccaaactaacactaacaaatccaaccagccattacaattgtagaaagaattttatattagcagtcagttttggggggatctaccacggaggacttcctaatttgctgtgtgtcttttaacaattcatttaccttcctgaatattgagtgctttatctgctaaatgaagataatattgtaatttcctctaagggatactgtgtaggtcaagtgaaacagagtgtgagccagttcactgtaaatgtgaacagtctagcatgaaagctgttacatttgttttcaagttataaacattgaaaatcctgacttccaggttttctttaagatatcaggagctctagcaacactgagcctggtaacagcctggtgcatgcctggcaacaacacagctactgtctctttgaggcagggcacctactctccagtttgctactgttttcattgagctcactgttacctgcctgggcctggaaggcaacyggatttagaatctctgcattttcagaggcatgatatgcctagaaacaaatacaacaaaaagaaactattgctagaacctcagaagtttaatgacagtatagtttttgaggccatgtggtctaaaacattttccatacaactgaggcaaagacactggggcaaagtatcagaaccagtaagtggcaacaggtttttcagcaaacggacagcactgctatctccttgtatttcagttcttatcatgcacatagaaactggagttgcacttaccttcttcaagcaaggaagcagatgcagaagtttctccatgcttattgcgaacaacaatagtgtattctccagcatcatcagcaaaagtcatagaaatcaccagcttgcattcaccggtttgtttgttgtaactcactttgtatctttatgtaaatgtacaaaatttaaaaatcagttatcaacaactcttctgtgggtaaaataattggacttatctgtgagtggatctgtggtataaaattcaatgaccctaaacatatgactaagctccacaatagattataagattgctgaaaattgagaaaaatgcaagaacatgagtaattagggccaaataagttaaaatattcattttaaagaatatttattgctagaatcagtcatgaaattaagtggttttcagtgtttatgttagcaaatgatcaggtcacttaaacaacaggtattttctctttgttcgttatttttctcattatttcattcagagatcaaatgaataattaaaacaataaattccttcaaatatttcagtattaactctctggtacattatatttattattatgaaggtacggcacctacatttttagattaccaggttgctctttttatcttaaattgcaaaatattcagagctaaattttatattgaattgaagaaaaattactagcatagatttttgtgcataactagctttcttcttcattacatggctattcttctatcttttagtcacttagttattacatgtttttattgaaaattgtctcaaatcttttctggaagtgtgtgtgtgtgtgtgtgtgtgtgggtgtgtttgtgtgaaaatccatattttctctactttcacaaactcaatgaattaaactataatgtaaagaaatatatcttccatccacttttgtcacatagctttatttcttaggaagactttgcacaaaaaaaatgtaaaaatacctcaaaacaaactaagaaggctccacaatgaaagagcctatgctcagggtcggtggggtgagtaaattctactctaggcttcatgcacgtattatacaagtcacagagaactctatattcagccatcaaaatacctgtatccagtggttagaggaacaccagattttttccagtatacatggggctttgggttgccgccaacttggcatccaaacaccacgctcccaccttccaccagtttctggaccactggttttgtaataaagtaaggcgcggcaggttctccaggccctgcttgttcctctgtgaggctagtatcagtcataaccacatctcttgactcaacaaagctggaaagagaattcccctcatattagcttccgggttgcaatttgccaatactggtggggctgaaagtcaaaatggtactagaacagctactaattagcaaaatattttaccgtttctcttctgtagtaaatttctcagtcacggctgtggtttccttttcaaattcttctgacactaaaagaagacaaaagtttctcattgagatgagatgtttagtgacccctgcttagcactgacagttaaattgaccatataatctccccccaagttccaaaaagggacatcatttcaaggtgcacagaaaccatattgtggaaaagagtgtcagatgaaagtgatggcatgtgcattaggactgtgggagggtggccactaaccctgcacagccagatagcaggatgtgctgacggttccagcctcatttacagcactgcaagtaaatcgcccgctgtcttccgcaaatgcttcgcgaatcataagacgagcaattccactctggaaggttatctggaagtcaatggaactttcgatttggtagtcttccctgtaccatgtcactgtcggggatgggtatccagagatgtggcactccaaggtgacagattcaccttctatgacagtcacattttttaagccctgaagagaggagaaaaaataaataatgatacgtgtgcatattcattaatcacttctgttttgtaacaaatgtagagtttgaacttatgcatttcaactgccacaaaatgkccttttaatcaggactccagaaatagtagtagagaaactaatatttatataatatactaatatattagtaaagagctgtaaggctcaatagcaaatgctacctattcaacaaagctttgccatggtatcaccaactggaatgaatctatgcctcccatggattctccttctgttgtgatgtttatcaccttatatattttattatgcttgtttgtgtacattttctctgatggcaaagaaaatatttcaaagagggatggattggtctttatgtctgcacagctcctgcaataatgccttctgcatattagaagctcattaaatcttttgaatccatgaatgatgtaccacatagaattcccttcttccttgccaaatatggtcaaatatggtcttccagaccaaatacggtcttaaaatgagcatctgtaagctcactaatgtcatttttgtattaatttgagaaactgatctttgcaaacgtgtattaaaatgatttgaggagatatgaatagggtccagcattatcaacttctttactcaccgagaccaaagttggtggagtaacaggaatttcaacaggtgctggtactcttgctgtttctgttacctagatttttacaaattatattacaaaatgctcatgaaattaagggaaatctcataaactcttagctcatgcaacattatataattataaaaatataaaaataattataaaaataatttgagaaaatgatctctgacccatactatgctccataaaaatcaagtcttagtatggcaaaggagaaaggcaagactccactggctacttttcagtacaaactagccaaccacctggccctgctcaatgggagtggaccatgtaacagcgggtaaccagtgaccaaccttggcttcgcgtccgtgcagtacttcaaagcgctcttcacggacggtggtgccagtgatgctcacccctacttcctttttcacctcaacgccagcttcactcttgtaagtatctggtgtgtcagcgaaggggaactgtggcaagggtgtgggctctgcccttactctagtctcactgggcttcacagtaggagccttcaccgatttggtgatcttctgagcagaagatgtggctgacaactctttttgtaatgtggcaatagcactaccggctattgatgcctacatggaaacagagtcagaaaataaagtcatttaaccatcctccgatggctagccctcttggactgagtctgagcctattttctataaggtctgttctttaatgttctcattagcactcattatcacacagttaatgaaaagtcatttagagataagccaattataaagctccttgtcatgcctgttagtttgtaaaacaaattttaaaatatcttttttaaagagttgtattcagaactccttattttacagcttttatcataaaaggacaggatcttctaaagcttagtcacgaattttcacttaaccattccgatgaatgccacttttgaaaataccacagtgggagattcaaaattaagaaattattgaaattgttggtaaatgcctaagaactactttgcaatagtacatttgggttttagccacaaatctatgtgaaaggtaaacatgaagacattcagaaaaaatattttaaaggtttccttactgcttttattctgttgtggtctatggttatttgttttgtaatttgggactaaatcaaatataggcattatatgtaacttacagttctttgaaggcatagaaggtttgggttctatttcttggatgtgtataataacaatagtgactaatatcaaggatttattacatgctgacaactgmaggtttttatgtcctttttacttgcattttacatgtatgcttactttctcctgatgacagagattataagggagaagatagggcactaatccagagctatttgattccacaatccaacccgaccaccatacagtaccacctctccatcttgctatattgagtatataaatatatgatttctcaatgtctgtctttattattgaaacacattcacagttaagttactctgaaatgtctcacagcataagtaaaactatgctgtgtaacacactacctttcacaaaatcattagaacaatagtaatcaaaacaattgagtttgagctgtccctgaaatgtgaactagagagaagcctgtgtggatttgtctctcctcagaggtataagataaccacttgtgactctaggctcactcccctgggcgagtttcagaaaccaaatctttagggtgtctgggcccactgtgaatgcaaacacacgcacacacacatcaccaaaaaagaatcctccattggcctaccccagagatgctctgtttcacaggttagatacttatttcctttaaacatttctgtatcatgctctgtaacttcttacctcatatccatgttctgtcttaggaacagaaatttttgaaacagtaaagtgagggctagctgtgcgggggcgtttatccacatggactaatctttccgttgttagatctgtagttttcttgatctgcattgaaatgaaactcagtgataccattgatcaccagatgaccacagcagtgaggcttgctttaccatgaacaaggtgaaaaatcagcaggtatagactcacctgtgatgatatgtgcattcccttttgatcagtagttttgatatgagtctcagaaggagcctggattactctaggcttgactgctttagggacaacgtggggttctgaggctggacgttggggaggctcagctacctttgcggcggaaatgcgttccttatatccgtactccaaagtggtctgctgagcataggattcttcaagatgcccaggctctctgggctctctgactcgggcctggtctactgcagcaacaactgttgctacagcttcagccttttttccaacgtccacctggagacaaggtttccagaattaatacataggaatatcgagatcaggctggaatatctcctgggcatcaggacaggcagatggcgtccacattatacagcagtgttaacgtgtctagaaatgtatctcagaaacacttttagggactatttcattgattattatattgtacagacatctatttagatatactctctgtacacctacttaattatactagacattaaatcacatatacacaacataggacaatcacaatatgaacataaaatcacaagaagattttgaaattttctagaatttttccaggcagacaatcaatcagcaattggaaaatcagaattttggagctggttcttttcactgattatttttattatcttgttgaccatttagtctggtattaatgcagtgacagtgatgatataagtgcactcaaataccgtcatcatcctgtccagaaaaatcagtgactacagagttatatggttgcatgcaaatcggacataacatgaaagctcacaaacacagagtgagcatatgaatttacttatgattccctaagggtaagattgtttaatctatcagaaaatacctttcttaaaacacacagatgacaaagagaaccccgtgcaaataaaaatattgtgattaaaatgaaagtgttatcatgtttggattcaagagaacaacctttcacattgaagtttaatttactttcattattatggagagttaaagcaaagaatgaaacaaatattattttctcgtttctgagtctgatgaacattaatggaaatacaatttgcagaggaggttctcttttaaagaaggcaaactagctgatgtggcttagatattatgattctatgtgatacttggaaacagcatacctcaaaaatcacatagccatgttcattttaaaagtacattttaaaagtgcattttaaaagtaagattggaaaattttattaatattcagttttctatacctgtgaatagaatctagaatgcatcagaaacattcttcaactatgctacctgcatatctttaaaaattattctctgaaccattcaagatataaatgagatttttctgagatggaattgggtctttagtgatcatgggctttatccagggcttccttttaggaagacacaaacaatttcatctgcctcgaaggactgcaaataccatcttcactttagattgcatcatctcagaaaaaaacataaaatacacatgaggcttaggtgagttaagtttgtccatttatttttttcttttttaaaaactatattggcaatgagctgactttaattgtatagacattttaaaatgttaacatcttcgacagataacactaaataaataaatattattttgattgtagtgtgatcacatttccactatatctcatttgaaccttttagccagtctgctatgaagtagtcagcttaagtcttaattttattttaacaatgataaaagaaactgtcaaagaaactgtcatatgactaaatatcacacaactgaaatatttaaattttgttcttgattttaaacatatggaaaaatcttaatcatggtaaaatattttaaattgaggaagcatctgtctgttttttccttgaattattgtatatcagatttatatacacacacttattggtggactacaaatgagtatgctggtaaccgcttttatttcttagtggactttgatatctctcacatgtttgtaacctagagaagcaggaagacaaattggactagaatactccaattcatacgagttaaatgctgagaataaatttaggagacataaagaagagtattatttggtctgacttttcactactagaaatgctcactgttcaactggaggatggactgaatctaaccatctctattgttttattgatcagttaaacaattagatggaacactagaagcacaattcacgacggatgaaaagttatgagagttgatgatgaaatgggatgaaacaatacttttcacctccatagcatcagttttcatctcttctcgaaaaagatgtatttgtttttgtttaatagtgaatccttctctagtcattggcggtgtggctggttcagcagattttgcagtggtaactactacttcaggtataaacattttctcagcttccatccttagctaatttttaacaaaaacaagatagtcaattcatgacaaaatttgaatggaaacaaaagtaaaaagttaatcactcatgaagtatgttgcatagtggaatttctgtcatttatgagacttctgaaaggctgatatgccattaaatgttagatttgagtaaaggtttaaaaagtttatcttaaatcatatcttagaaaaaaaagatgtagagtcagaaaatgacactgagggaaatacaaataggattcaggccatcctgctaatgaaatggaaaaactttagttgctaattttcaagtggtatattagcaataaagaatacaattaggtaaatggctcatttggagtaaatgacagagtcatgggaaacagtttaattcatggatatttcatagctacaaatagatacggtaatcttttcatggcttatgtgtaattgttctgtttggatacttccttctctagattttaatatgcatcttgtttagctttagtgggagctgctacagcatgcattataattttttcagcttatcttctcctctgatatttacaggagggaaaaaagataaagtttcatacaaagaaaattatgggtaatttactgaaataagtcatactccataacataatatactgaatttatgacccttcaaaacacacatcttcttgacagtgagtaagagtcatcatttacttatacatcttccgtgtttttaaaaaatgttcatgggcctcttaaaattagcctgcatgcaattttaatcaacttctggaagattcccagatgttaataaaatgttgacaataatggtgaagagataagtggagaaagggatatgtagtaatattaacaataataaatttttttagtttccaattatttaattgtctaaaaaataaatttggttaatagtgactcatacataagaaattcagagacttgatattaatgtattacaataaggaatttcacatgatatgtggtattaatgtattataataggggatttcacacttggaacaacaatagtcacctttccatgggtaacttggatttgttcttgtctagtagccatagtttctctagttctcagtattgtttcttgttctttggctttagcagtagcaactgctattgtagacaaggcagttttctcggcttcctttctcatctgattattacagtaaaatcaagatttaagttgaacagggcttcaaacacacatagtatgacccttcccccttcctcatggggatgcaagatggttattcagggttaaatacacaagagaaataaactttcaccggcaatgtctacatatactgactgagaatcacaaaacttagaaatgttagctattaaaaaacctctagatgagtccctgtgtcactttttaaaaattaagctaaaaaatgctaatcttcatgcaaagaataatggtgaataaaatgaattataaatgttacagatggatgaaaatcaaatgtgcagataaaattaatgataatcagtctcatatttaccattttgtttttagttagggattttaaaaggcaaatacagattaataattcataccatattgtagttaatagtttactagaaattagtttaaagatgaacttttcacagctcaaatatctgtattcaccttctcctgagttatttgcacttgttctcttttggtagtaatgccttctctacctcttgatactaaatcttgttctttgactttgggtgtggcaactatgactttaggtacaactgttttcctagtttccttcattatctgatcatacaaaagaaagtaagaaaatagtcattaaattccataaatctttaataaaagaaacgtaagtcaaaaagaaaggaggcaaaatttcttcctattcaaggaaattttaattgcactaaaatatatcatttgagttactttgatcatccatactgtttcactggcaaaaatatcaaaacaataagtccagtttaaaagaaaaaaatgtgattagcaataaaagactaatgagtgctattttgtacttttcacattttttaaaactgcaatctctgagacatttcagtagcactgtaaatagcacataattttttgtattatgaattgacttgtttacggacatctgcttcaataggaagatattaaagtgaattattatattatattagtaacaagccaaagaaagtctgaaagttaggaatgaattgacagtgaaaggtagctgtgtgggaaaagaaattttctatttgcattataagaagaggtggaagtgaagaagtgatgattaagatccatgatgaaaatgtaggtgatttgcaaatgaaatggtgcaagagtgactttcacattggcaggaagtcatcaccttttcataacttaggtgcatttgatcttgttgtgtggtagtttcttcttgagctcccgggactgtttctagttttgtggactttgcagtggcaactaccaccatggatgcagcagttatctcagtttcctgtcttatctgatgtttagagtaaaataaagatttgagtttcaaaagatacaaaagcaatgggaagacatccttgaaacactcaggaaaatacaggatgcttagtggtgaacgataaaatgtcagatttccatttcaggggcctacacttgtgcttaatacatagactgctttcctgaggaatgggcttcttttctgcccacatgcgccttagcaaattgtcctagaactgaacatatctcatcttgagacatgtcaacgtgttagggaacccggtgggtggctgctgacaagtggctggaaaaccataggccagctgaacttgccagtcaccagcattgcaatggcaatggggatttctatgcctttgattatcctaagtagggttcttgctgctttcaaaatgtctcactcacagtaaggagagggaaattcagtcagcagcctctggtcagccttttaagtgtacaaggttctcaactggacctttaaagaaagtagctctaagatcagcaaagagcttgagttcaaggaggatgagcacaggcgccctctttgacatggaagaattcaagataaatgcctctctcctgacacttaaaggtttgatttcacatacgggagagatgtggattttagtgacactgagattgtcctcacacagctctacggcacaacagcagcaaatgcttctaggtcactgtttatcaaccgtgaattgaaggaatttttttttttgaggaagtatttgctttctccgatgtctggcatatcctcactttcccttgctatttattcggggtgtttatggctgatgtatgtgtatatgtgtgtgtgtgtgtgtgtgtgtgtgcatgtgtgtgtgcatgtaaagtttgtgcattacaatctaagtgactgagggcttaggctatgcacgaagaaaccaactgtcccggtgggtaactggactggcatgatatctatcatccatttatgtatgttctagaaagttcatagatgtgccctaaactgttctgtagacaatctcctgaaaactgatcaagtgagtggaaaatagtgcaatgtgaacataatttccatcctgagtttcaatactagacatagaggaacaataacaaaaaatatacaaccaaagacttctccatttaagggttttgactataagctacctgcagctggctgtaatgtgatattgtcaacaaactacaaaatatttagaaaatcagacttactgcttcttgagttacttgtttctgtttcttagtaatttcttcagaaattctagtttcttgttctttggctttagctgcggaaattactacctttggtacaaatgttttttcagtttcttttcttatctgcaaagaatgatttaagaaaaaactttatttcctgatgcccaatgaaataatatggtgtttattaaatataacaacataggaatttgaagatgtaaaatcccttttctgcagatgtcactaaataaaataaataatcccatgttcataaataagatcatgctctttctctccttaaactgtaaattatgtaggctgcttagagaaaacaaagttgaattcaacactttgttttgaacagcagaattgtagtcttctttaaaatgacttccaatgtttacaaatagatctatggcaatattattctgtactaattctgtcatctaaaggtaatcttagaatatatatcagaatggaagactttagaagtaattttgtctgatctttttattttacatgtgagaaatcaagcatggataatttataatctgcatttatacaatatttttgttttgtcagttttcctaaatactgtgaagaatgctgtttccatctgggcacctaaggtatatgcgtatgtagggggacagttttctctatttgcctctttgccattctcaaatatctcatcactgaaacacaggatctcaaggctgaaagggacttgaaattcatcttctcaaaccacccaactgccaactggttccactggccaagagctctactaactggcattttccaatctgtccccaaatgccgccaaccatggggctgtccttttcaccttttctggtcatttggcttgttaaagccatgctgtccattccacttcaaactcatgtgcaaatgtcttccgaaggagccaggaagcagttgctaagatttctaaagcaaagtgagttcagtgtctcctccacttttccccattcctgcctcagcatctatttcttcctcctggttttagccatctgtcctctccctatagtcttatacttagtgcatccccagatcaatgtgatgagacccctgtttctactcctggtgtatgttcacagagttctttttcatactcacaaggggagcattcagggacactaccaaactttggtatccagtacccagaaatttacacatacaacaaggggatcttattagtatgctaacaaccatgtggcccaaggaacaacactcttcatggtaaaggtgattatctgtgttgacccctgtaagaacctcagtgaatttaaaatacaaacccattttcacctgctcatgagttacgtgcatctgctcttgctttgtggtaattacttctttggttcttgattttaattcttgttccttggctttatcggcggccactactaccttagttacagcagtcttctccgcttcctttcttacctgcttttcatagagaaaggaagaaaacaccttaatgcatcttacataaaaattagttcaagaccagcctcgccaacatggtgaaatcctctactaaaaaatacaaaaattagctgggtgtggtggcgcacacctgtaatcccagctactcacgagactgaggcacaagaatcacttaaacccaggaggcggaggctgcagtgagcggaggtcatgccactgcactctagcctgggtgacagagcgagactctgtctcagaaaagaaaaaaaagttacaataatctgtcaggatttagacataaatgtcacacaagaggataaggaggaaagctggaatgattttaaactgtaacagaaaatctattcaaatgcgaggtgggacattatcctggatttatgacactgttccagctatgaatcaagtgtcatgtttgttttgagaaaagtaaaaacaaaagtcctttggggaaacttagagaaatgtaatgccttccctgaaatagtagtttccacatccagtgtgtgcagtgactgagctctggaattgactggtctctgtttctctggccactctttgccttcctaccttgaataccatagttgacttttgcctgctcatatagcccaggtatttctggcctactctgctcttgtgatactcacattgtcaacacctttgacatctccgaccaccttttgctcagaaagttctaaaagtctgggccctgctgggctcaaggctgtcttcagaatgaattgagcacagctgcatgccaagctcagtggatggtggttgagttaatgtgcactgaaggacgtggctctgcgggtgccccatggcagcctcgcacgtacctgttcttgagcaggttggatgtgcacagcagtcgtggttgtcctctgagcagtctgctctacagcgctgatcactggttctctcactctggccatatcaacggcagcaacaacagtcgcaacagctgcacttttgtcagcatcttgtttcacctagattagaaatgaccaagtagattacttttttaaatgacatgcccagtagaaaataaaaaagcatactggaaaactgagccacctagagcaaaatacactcatacataagcatttattattgccaagaaatacagagactgtatcattaaaacctgtatattatggaaacttcacagattggagcttttgtcctaattaaaaatggttttacaaagcatgactactgaatttggtcttcagttgctgctatatttttatgttcatatgcatttttcctccaatttatacagactgagtttcatggcagaaatccagttggagaaactagaatgtgaaataaggaaaaacaaaaccattctgacagtacctctttagcaccagtggcaacagcctctgctgcgtagctagcactggccgacacactggcggcagcacccgcagcaccactgatggtcacttgctcctggacaccgtatctcccttcccatctctcttctgtcctgatctgagtagaggttgtcagcgttgtctctctcatctcagcctcagatgaggaggccacgtagccctcttgcttccaagggggaggcacttcaggacctgtggccacggtggatgcctgagtcttacgcatgagcaatggagacctaacagacctgatgggggatgtggagattcttgctgctggagacacggacctgaaaaccaaaaggcagaggtcaagaatgtcaaagcaaggaggggtaactggatgtgaatcatgagatgaaaagctggaagtgctttaaggcagagttttaaaatgtgtgcctccataacccattcagagggtaaataatgtacttggaagtaatttgttttaaatctcaataaacctattcttatctgctgtaaccctgtaagagaatcagctttaattccaaataagctggagattttgtgccttgcaccttctcacattaaaaaaaaaaaaaaatcacaacagaaaaagctacttctttaatatgcagccaaaggaaagacatgtcaaatccagcaacctctgtattccaaattcatctctgtattccaattctgggggggttagaggatgtcaaataggtgttataagaagaaaggtttctgtaatcaaaatgcttgtgccactcttgactaagcagcttaagccatttttttttttcccctgcaggacttcccacagcctttactatgtcagtatgccttgtgaatttccaggacagggggacacatcctcaggaagctttctgcagcatgttgctgggtacaggttgtgcagtgcactttgcaaattgctgctttagccgaagtgtttgtggacagctacttttaatttcctccatatttgtttacactcgccccccttgtattgcactctggacttattttaaatatctttagagttattgtgggaattgactaacttaaaaactaatgattctgtgatttttgggtaaattgataaagttgcttcttccagaatagttttcattgtttgctttttaggtgtatccaaagtgcaagtagcatcagttgaagaatttgggtgctaaatcccagcactgatggccaaaaaagactatttctgatctatagcaataattctggggattggccaactattgtaaggtaaaatttttttcagaactgatttaattcttaataaggcttattacattttcctctctaggtggcagtattgccctatcattgcattttattaattctgcatataagaaaatgtttataaatgcatcttgtcactatctaggatatttagcttacactgatcatacatgaaatgattattctaattaagctcaaggtacagttgatattttctctaacttacagagtaccctaacagtacattacaacattaaccagtttcacgaagaaatgtttattttctcgaagaatggctttttttgtgtgaaaatccatttacattttgtaaatgaagttgtaatcaaactaaagggaaatctagggaataagcctcttttctgaacatgactgcctttgaaatataacaaaaaccaagttagaataatgtgtggtttccactaactgaagaaaagcaaagagacatgtgcttttaagtttcaccctgtgccttgttcttgctgtacttagtaaatgggtttaattcaaaaagagttaaagacatgattagcatgacatgactgattaacagcaggacacaggtaagcccataactgtgaaaatcattgtaattttggtcattataggagagtgcttatttctgtacttacaacaaaaaataatcacctggtcacagcgagatacaatgcaccttattcaatgaaatatgtttgccttactctacaacaaaaatcaagattaaactatgagatatttaggaagcagtctatctttgataaccattattttctctgcaaattggcattttatttcttaattattggaaagcaaaattttggggcaatttggatggttattaatgaactttcaaaactgctaagatggtcaaaatgctccatgggatcagggacactccatgattctaaatgacccttaggcttgggttttaaaatatagttaggttgttatctcctcaagaaattgcatttggcttgtgttgtgatttcatggtgtgcaaacttggatttagcctgagactgaacatttttttttattcgactgctagacatgttttttaaagtaagctttttgttcaaggtttcatgttagtgtttgccaatatctttacatttttgtggctaaaacaataaaaattggaaaacatctagcattttttttcacatgtttattggacttttacattgcctcttatgttaaatacttttttgtatcttttgtctttttttgtgttgcatttttttcctttaaaaattaatttgtggatgatttttaatgcatttagtgcatttattggttatttgtcgtaagtgttgcaaacattcccccagatccatttcttttaatccatttcaatattttgcttgtttatgggtcttatccagcataagcttacgtaattttgtatgttatatactgtttctaggctggtgttgtctaccttgtagccattttatgtttattgtgatacttttatggcagaggcaatgaagtaccttgaggaggagaaaggtcttaaaattttttcacaagtgctgtttggtttagaaatgactttttgcttttgccatacatacatgttgatttttatgtagttgaatctgtaactgtctttttaaaagctttcacccataaatgcttttgcagattgtcttctctttttttttcattttttaactatttaatcaagctgaaatttattctgtaaatagtgagaggcagaggtttatgtttgtttgcttccagatggatagctaattggaccagcattctttattaaaatacctctccctcccctgaattgaaaggccactttgctttttgaattccctatatacttggatctattatacttggatctctttctggactctctgttttgttcccctggtgtatttttctattcatttaccaataccatactgttctgattatagtaactttacagtatgtttgaatattatttaggtcaactatctccttattattcttttataaaaaattttcttggcagggaacatccatgtgttttttatttcatttaaattgatcaataaacacttctttgctcaaattttgtacatttttcatttcatcatattaaaagtttcatcatgataaactaaatcccaaactttcaaaactgttgtggacaatttacacttgattatataatttctgagccctgatcatgatacatgatcaccttctaaaatacttccatattaagtaagcatagaagtccattttattttctagataaaataacacaagcatatgcaaaatatttaaaaggttttacttaccatctgaatataagaatattggcataattattttctatttacaaggcactttcaactaattatctcattgaagccccaaaatgcagcttgagatcattcttattgtgactctctttaatttacagatgacacaactgaaaccttaaataaactgcttaacttctttaattccagttacctatcaataacattgaggataataattcttacaggttgtgaacatttaatgagataatgtatgtatagttccaatctgatagaggaagtgatccatatataataacaattattttattatttatacttattgccctaaatcaaactgttaagtgatcaggctgatttgtccttagggctttgaactctaacttctgtgctcttctcctttcactgtgccatattttggcccctaaagtagatatttattacatgaaatataaataagaattcagaagtttataagggtcttcaatttacctgtggacagtgaggatttgtgaaaatcatattcagtaacttcttggtttacctcctttgtcacctgctacatttttgagtgcatgaaacttacacgggaggagggcagggaagtgctgggaagagaagtgcgtggtccctagcgaggcctgtgcccatggacctaggtgaggacaaacactcctgccttcccgcccaaatgttgcatttcccaagatcaccctgacctgccacgcccacaccctatgcctataaaaacccctgagaccctagtaggcagacacacaagcggctggatgtccagaggaacacggagccccacaacctgcccgtttgtatgctcccctagaggtttgagcagcgggacactgaagaagcgaaccactctccgcgtcgcatgccctgcgagggggacaagggaatctttctcgtttcaaaacctagttccaaaatgtgcaataatctgctctctctatggcagctttacctgaccggagatggggtcggtgcccgcacgtgtctgaccggggaaggggagtgtcttatgggcgatggggactgctgccgagccagctgtgctttggcagcaatagacggtggtgttggggatcttgactttggcttcggaggaatcctgggaggtgttttatgtggcagctgttgcccagcggcaccatctatgaccatctcaactgttgcaattgatctggcatcaaagtgggcttcaatcttctgtaaaagattaaaacaaagcccacgttgaggaggaatagctggggacgcaacagcctgaaaggcttgaaaaccaacagtatagaaaaataccttttcaattcgggtttgtcttgattctgagatctgagcagtcgaaacaattgtctttgtctttttagcaggtacttcttcttcacctgtgggaagggaaagatgaatgtttgggagggggcacaatgacccattttaaaagagattctgttaattctgactacaaagtcaaaaagattttctggatatcccaatggagaaaattgcagaaagttttggattttgcatgaatataaattaggtttaaaaatagaaaatgttcattacaagataaaaatttacttagaatgattttttaaaatttcattatttgccaataatttggaaatgtagatcacttaattgaaaccctttccagtttataatgagattcataagcacagattgcttctattctgcgctcctgactagaatctcagggacttttcatgggtgtcgaaaagccagcttttatatcagctcacagcattcttcccagggctgtgagaggtggcaagtggacgcttggccccatttagacacaaaccagctctctccccttctctctgttcctcaacctccagcacgtaccttgaaccagtaattcagcagtcgaagtagctcttccaacgctattggtggcatttactgaataggtccctgagtcctcagggtatgcttctgcaatcagtaagctgtagaggtcgccttcttgtgaaatttggaaatcaagggagctctggatttcggctccatcccggtagaacttcaccacaggtgtagggattccagtcactctcacttggagtctcacttggcttccttgtctcacggtcatgctctgcagtcgttgaacgaagttgggtggtgctgtctcagctgcggggacaagagaacaaagtcaagagtgagagccagggtgctccctacaaggtatttttaaataatcacagctccaattccaaaaccaggtgatgactcgccaatctaaacatccttgaatgtccttgaacccagctcacccagcaatgacagcaagaatgggagccaggagattacagaaggctttctcaccaccatattttattttatttgctttgttttgctgagcagtttaggccaccaccttttgtttctttgttttaaataaaagctctagattttgttataacatttcttgagaatctttctggtacttccccctctacctcacatctagcgctctattaatatgtgaaagccatgttgcatattccagtaagttgcattaaaatgaattccagtggttgctacgatgggtgtacctgttacttaaagaatcattacatttttaatttaatttttaaaattctaaaccttctccaacttgataggtattcaaataacccaaatatttacttgcatttaaaacgttaatcccaataataacattacttcattttaattgtgttacagaaaggggatttttttggttatgttgaaggaaattttttataagtgtgaggagtgagtggaattaactttgacatgattttgagtaataaacaacagcaggtgctgccaaccctgtgcattttccatttgtgaattttctgggtgcatgctaaagttctacctgatgttacttgatgtggtttctgcttaggtcaattatagccctataattgaacatcattgaaggtaaagtttattggataagcatatgtaactttacgwagctcatgtaagatattgttataaaacatgtaaaggcatgcaatattctgtatactaatgtctcactaggtagtaaaggatagagaaaaacaacagaggccactaagattggtgataagttttctggggaaacagtgtcatgcatttgaataataaacaagcatttattttcttctgggtatgtttacatgcctcttaaatgggtggtctgtagactaccggcatcagaattatctggatgcttgttaaagtgtgaattcctggagattcacacttccctggagaatatgtcttattccttaaaggacttataaacaaggctccaagcttttctacttgctgagaaacatgatttttaatatttccttaacatacttttgagtgtttaatatgtgtattgagaaactgattctcagtcacttttacgatgtactctagaggaaaattaaattccaaaaggcaaacaacttggttataaataattcagcctccagtagacccttctgtagtttaagagctgcatctacctctgcccatagctttttctggactcctttcccaatttgctggagatgtcctctgggggagcagaggattggcaggtccccagcagcctacctttcacgagaagctcagcagtactagtcgcttgtccagatccattggtggctttcagggaatatcgtccactgttggctttagtcacggcggggatcgtcagtttagcgcggccatcgctaaaggagatctgcacgccgggcagagtggaagtggaaatcacctggccatccctaaaccagctcacctcaggaactggaaaacctgaagagcaagaacaattcayctttatgtttgaatgggcaccacaaagtcctctgctctgtcccatcatgttcactgccttgtccgaatctgtaaaagctttccagcatggaatgccacttaatgatagggaaaaccctacagttgcatgatcagtgtgtaaacctgcagaccattaggaaggcaggaagggaggaaactgagaccaaaagaggcctaatgatttttccaaggtccttcagctagcagtgacacagaggggactagaatttccatctcctgcctgcctgcctagggctctatctgatgcaatttaatagacaacattaaaatcatgaaagggacttataaaaatgaagaaccaaggaaaatttgaaataaagagtgattgttgtcctctttgagagcaagtgaagaacaaaagcagcaaactgatctccagtttctgcctgacaagcccaggaggcatgccctcctccctcctctgtggttacagggacactgtcttcttggactcttctgctttcacaagtgcaatcagtaaaaacattgtaacatggacaagcaatttctcataagagactaatccaaacctagtcttccagaacaacatggatcattggaattgcaggtagaaagccaaattctctttatctgccataaattgtagagccaagaactacatgtccatggtttgatgttttaaatatattaaaactctgtacattgagaatgtaygaggcacattcagggcatgatttatttcacacttggcataaaggttgatgctctatctacttacgctggtaggtaaagataatctagagaaagtctattttgttgtttatacattagcccatctcccactatggccaattaaatagtttattggactgatttatgggtattggatattttcagtagtgtctttgtaataatttatttgcatatagtttgaaggaacaagaagatatgaagtagccagattccactacttctcaaggaggcaaattcccactgaagtcatatgtgttctgctcagttcagaagttactgagtgttaccagataaataggtaaattatttggaagtcggtaagacttattttctattgtacatatatagaccaatgaaaagggaatttcattggtctatatatgtacaatagaaaataagcaatgattatatgatatttgtacaatgtaaaagaaagtattatccagttatgaataagattggtgcatataatagaaaaaaagagaaaaaaagaaattttattttatatctttattataagccataaaattttaaaaaagaagtgggcaatgaaccatggaagtgcactaaattaagaattaagcatgattttttttaatccgtatccatcttacatggctcgttacaatactacagaaagagaaaatattgattaattttaaaattatttacaatatagttcatacactactctccattttttcataagatgataccatgcatttttttgaaccatccataaactgagttatgaggaagaaaaagaaggcaaaaaagagatgaacttcctttcagataaaattctagggttagtgtttgcttccttttaaatagagacacccgagaagcatattattttctgtcatttcaaaacgattggaaagtcttttaattcattagaatcactcaataaagattgaaaataaaataataaaataatgaggagttggttaattactgaacagctctgcctctgaggaaaattagatgcactgttattttgcgtgtgaaccaactgaagttcaggtgtccagagcaggcagcccagactgcctaccccatggctctgtggctggcttctattgggcttgagttcttggcttccagtctggctctgcagctgagcccaaatatagaatgactaaatttggtcctatttagttgctggattctaacggcaattttaatccaacactaattatttttgctttgtggaataataaatatgaataaaacatttcaagccattatattgtcagattttgtcagtactctgtgaatggtatacccttaaaatgacctttccatagtgttggactaattttccgaagtgaaagcagggcttaaacttggcgtcaagtcctgcagcaacgttaacttactggagaggaggcaaaggaaaaaaaaacaaaagtgtgaatgtgtgagcttaccactaatgtgagcctcaaaggttgcggtactaccctccagtaccacaacgctttgtaacggctgcgtaaacgtcggtgcttgagttgtcatctttctaggcactctgaaaaagaagagaaaataaattagggtgtcccagctaagggtcactctggagctgctttgcagatagcagagacacacgtttctccaaatggattgctccataggtcatctgtgggcctagagtgatgggcaggtcttctcttttgtggcttgaacagttttgcatagttcatcattgagttgacttaaagcctaacccaaagtagcaagtgtaaggggaaatggaaaaaagtattagccaaacagaacaaggaatgaaccctagtggtcaaagagggaatatacagtcttaccaatggtggaaaaccaggttcagagttgaagaagaaaaccacagcaatgcagggttagtgaagtgtaattagagagacaagacatgtgataaatgtaaaataaacctctgggcctggcgtggtggctcatgctggtaatcccagcactttaggaggccgaggcgggaggattacttgaggtcaggagtttgagaccagtttggctaacatggtgaaacccctgtctctactacaaatacaaaaattagccaggcgtggtggcccatgtctgtagtcccagctacttgggaggctgaggcatgagaattgcttaaacccaggaggtggaggttgcagtgagcaaagatggtgccaccacactccagcctgggtgacagaatgagactctgtctcaaaaaaaaaaaaaaaaaaaaattaaaataaataaacctctgcatcagcttagtaagtgaaaattattttaaaaattttccttctccccaatatttttcgttcactctatatttataaagttgacattgattcagacattatctgattacttaaaatagttgccagaagtaaaaatctgaactttgtaatctctttcctgactggagaagctttggcaagccttatcaaatatgcaagctttttgtagacggcatacggtgctttctatttcttaacatttcttcatactgtaactgtgcagtaaatgttgttactgctgaagtaaatattcagaaaaatttaaattttagtgaacaggccaaagtttattatagttctgaaagaaaaatgctggcttgagttcttaatatggaacaatttgcaaactttgaataatggaaggctggtgtaaaatgtagatgaagtgaaaaggcctatgctttcataaagtaaaatattcaacatcaaagaaacgaatataaaatttgcagttaagtcattttgttaagtgcaagaaagtactttgcctatcagtttcagagacattatgtgaagaattttctgatgcataaatacctaattattcaacatgactattctgttctgaaatagaacatttctgaattgtcaatcacttcattactatttttcattaaattctttgtttactaaaacttcatggagcaataatcttcttagtgataattctgttccttactgtaaccttctacttagttaaaaaaatgaaaccagcattctctgagacaataaaatttatatttggaaaaatcagataatatccaaaagctttcataaattttttttgtcagaaactcctttttgtagcatattatctttgggatgaacaactttctgtgtctaactttgtctgtttataagttagtatatctaaaaatagctgtcctcttagacatagaatacctaattatatatctatgtatttacaggcattgacaattagtaatcaaattctaggaagatgagaaatcaaagtgtatttagaagtaagaaacctttcctttaaacattatttcttacccttcttagtgtcaacatttatctcaaaatatataattggactgtgtgctgagttaaaatgcatgaagagattctgaatattttagaaaacaattatatcattttattccaaatctccaactatgttgcaattaaccagcttaaattgatcttacattcctattgtctaggtaaattttattgccttagcacttgctcttcacaggcctttgtctaactggggctgaaggtatgcgtctaaaatgtcatgctcttaaaataaactctcctaaactctccaaggttgactgacagcaggcaagtgttctgtcactgtcctgcaactgatacctcagcagttgattcccttaaaaagtcatcagggtgtagctgataccacatgcattttatcagagctattcttggtgtgcttaactttatcattgagtaatataaccttgaacattctcaacaggcaaagagagtctagaaaagaagtaaacatttctctcaacatttcagacctcaacttttagaatattaagtgaacttaaacaatttgaatcatggaatcatttagctgatataataaagctttcaactttttaaggaaaaatgttcagacattttaaaatagaatttaacaagcagatttaaataatgggtcagcactggcaagaaatagtcatacaaacacttgtacataggcatttagcacacacaaataatccagagccagagatcaataagaaagtgactctactattaaaataagaaaagttgctgctcacctgatttctcaagagtgcctaaaaagggtgggactaagcccaaggttgcttctgaaacgacgtcctatggagagttggtttttctgaccatctccgacatgaatcggtgagcctctaatcctaaaaacaaaactacacagtcaagactgtgtagttttgcttttctatgcaatccctacacccgaggcgaggctgggaatgcacgactgctcaagagccagggtctggcctgcccttatattcaccagatctgctgacagccccacatccttaggcagggccctgggtgattggctgtcttaggaaagcatgatgggagaggacctatttggtagtgtcacataccacctgttcttctgattgacagtgctaaatttagtacctcaaaggagacttcaccaaggaaatagaactgtatttaaagaataactgtgttgaggctcagagaagagcattggttgctgatgttaaaatcygaaaatgcaggtttaaagaggtgtgacagtagatagcacttgtgggcagtcatacaaaagagccccaaacctgaggactgtgccctgagtcaggccccagtcctgttcccttcccccataaaacaaaccaaayggacctgtcaatcatgacagcagatgaggaaatttatctcaagcataaggcttcatgttctctgaagaatcagttgctataaaccttaacgttgaagagagctcatttgtactacctacattctccagaatccacttgtatttcggggacagttacactgatgttaatgagcttattgcttatacaaccctgcaagatataatgttgaaaggcaaaattggaactctgcttaggttagtctgtacagtacaatgatttcacctttgtcagatttcatttttgtctggcattaatatttacaaatatgtgtgtactgctccttagtaagtagccaggtcttatgcttaaatcatccataaggttccttttccagacacatgaatgctgttctgctaatctctggagtttgctgttactaatgggaagtggataggaggtgatatagttgctattttaggactgaatttaatttcaagcaagagatatttcaaataaaaaagagcacaccaaaagatctttataatgactcagctgagagatttgtgaaactctacttagagggaggaaaattgtcttgttgataatggaaagagacttttatcaataaaagagactaaaatttttaatttaagttaaatttctttatgtctgtaataaaaatattccctgttatggaagaatttggccatgcattaaacttttcaatttcttgagtatttcatatcttgtatttatttatatagtgattaatatgttaatgtttaacagtttaaatttactgacaactaatgtagtatagttatgttaacaagatgacgccatgtacttatttaaacatttttctcctttacttaagtggtggtatctgtattggtggcaccatttccacccccatagatggcatctgctataattctatttgattgctttattcagaaacaactggtttcatattatatactttgaaaattattcccactgagagatttgtgttacaaagaatctgccagtcataaggcaaagaaacactagaaaygtatgatctttctgttttggagtgttcaccaattggctatctatttaagatacgtttgtgcatatttgtgtgtgggtatgtagtgtgcgtgtgtgtatttttagactcatttgacctaatgtgaagcacattaatgttacgttatgtttgttggaactaaagtcaaatcattttaattcttacgggaactagagggaagaagtgactataatctggaagcctgcgtcatcttgacatgatgcaattcaggtaactcaagagccaagaagatggaccatatgttataaacataaagtcaagtgtctgtcctcttaagctgattgtctagtcactgttcttagacttttctagaccctgcctgccagcctacatctttctcccgagctggatgcttcctgccctcgaacatcggactccaagttcttcagttttggggcttggactgtctctccttgctcctcagcttgcagacagcatattgtgggaccttgtgattgtgtgaattaatacttaacaaacttccctttatataaatatatatatgtatgtatatattcttccctatatacatattagttctgtccctctagagaaccctaatacaccttgcaatattgtcaagatccttgcctttaggcctttatatgtttatgtgacattcagaattaagaaaagaaaaaaatgaatgaacaaaagaaaaaagaagaaagaaaaggaaagaagggaccagttagtaaataactaatatgctgctctgaaaaagagttcttattattggaatagtaatggacagtatatgatatcatggtatgcattagttttaaaattaaatatgccatcgttagaattagtaaactagtcttgtggaaaccaaatactaggcagatttggggagtttgctgatggagtaagatctcaatttaccaccctaacagtggggaggagccacacagataatcccaaacagctgataattcaaatgtaatgcctacttaatttggaatgcatggcatgattctctctttaagcacaatattcaatgaaattcaataaatatttattaaacatatagtcagtgctgagcactgggataaattattacgattttggattctgtcattatttattgatttgacaaatatctactgagtggtgactttgtgctgggcattgtgctagtgatggctaggcagagctgaccaagaaaagacagttagaattattgtgctcttagagatcatggtctacatcaactcttagtgaatgctcattaatctgtgactgagaccaagtctaggatatatgtaaaactcaggcagtaactccaactacatagtcagactttrtttaccttatataggaccatttacaaaggaaggacttactgggagttattcgagaaatgggtacagttttgaaggccaatgcaaggatactagaagagagtaaaactaatgtatcttatgamtgattaaatttttttgtgtgttcttttattgtattaaacacagtttaggcacagagatcatagcaatgcacacaacacacaaaaatacctgccctctaagagtttacatttttgttaacacagtaatattaagtgatataatatctgtaatttcctttccactcataaaatatatcaaagctgaaatataggctcatcatggagctatttttaaacaaggaaatagaaaagcaaattcaagaagtgcacagggaaaagcgtgctgacaaaaacaatttattctaatggaagacagtcgtgttctttgagttatagaggcggaaaaagctacactgggaatgtgggaggcaagaaattgttgcttacaatttaaaagacttattgtcccatttttttctacatccagttataatttctttagaagcaagatcaaattaggtttccacaactatttacaagtgtacgaatagtcacagatgcatttaacaccacatcgaatacaaaaagattatttcagacacgtaagatatttttaccaaagtaagaaagataaaaaaattaaagtcttgaatgtctcagtagcactgctgttaggggcacttggaatttctctcctattctacctgggtttaggcaactcacttgaatctctgtctcagatttgtcagttgcaaattggagattattatctcgacttcaaagagttattaggaatattaaatgacagaatgaacgtgacagtgtccaggaccatgagaatctgacacatggtaggcattttgtttgtttgctgctgccaggcatgacactaagaaaataatttctgtgcttggtagtattgatttgctcaattatctctgactacctgataaaatatacaagatagtattttctaagaaatctttgagaagtccaaaagtgagctcatggaataaagcacatgtcacgtccttccctgaaggccctcagaaggtgacatgacacttatatgtggattaaagcaaagcccaagaaatactggaatcttaaaaaagaaataagttggacttctgaaggcctgtggcaggaatctataaacctgattagatctaaccaccagcaaatgctcattggaggtgatactgctgtcaaatatcaagctttacacatgctgaagggaggcaaccaggctcattttttccagtaaccactgcagacacggcacctggggacagggattaagggctctttcagggccaaaaacatgtttgggagctgaaaaataagttttgctttgaaatacaaaaagaaatctgcaacaatgaaaataatggatatttatcaaatacctacaaaagaagatatgtcaactagtcaactgcacttgagattggtatatttcaatgcgtctgacaagctcagggatggattttccaaaactgaaacagtctctgtgggacaaaaatctaaaaatggccctcaaagctctacagtctcaaaaaacaaaggttaatctttgtttttttaaagtaaaggaaactactcagtgcccacacagccaagtgctgatttttctccagcttccattatcacctccagaagtttacttttttatttctaaacaaagtctattcttcctttgaagctaaagattctttagctaccactttctacctatcttctccaggctttcagggtgttttcttcaaaggccttctcaacatttcctgaagacatcagcatcagaacccctagtgtaagccttgccaacaccctgagggactcccacatccatgtgtaaccacactagaggaaaatgatggatagcacagtttctaaatcagaccgactttggatcaaatcccagatgcaccagttattagcaaaatgaccctggattaatcattgaagcttcatttcttccttgtaaaatgggaatactcacttcttcgtagtgaatattctcctttactgttgttttggttttcattaactagattttgtaagttcttatttgattttttatttttacaaatagttttacatactagtattttttttcatagcacattttataacaaatgctcaatgtggaagctattgctggttattgttgttatttgaatagccctttctacacctttagccacacagttcctgcctggcaggtctgaaatggcattcatttcttctttcccacttcagcaccttacctctgtgaccatactttgggtcttgccctcttcaggtctttcttctgtggagttgcttctcttctaacatcaacagagaagttaaagatacatctcttttcatcagtattatcatgagtagagcgtaaacatttactctataaccatatacatatgcttatctgtcttcctccagtgtcaggggaaaatgggtctattactcttcaaggctagaccaatattcaggatccttctactcttgtttcttccaagacacacactattccatataatatgtttaacttctcctatctagaagcttcttccccttaccagccactctacttgatacattgttttcccatttaattataactgagcttattgctgtattaatttctttatttcttattgttatggtctaaatgtttgtttccttccaaaattcatgttgaaatctaaccccaaaggtgatggttttaagagatggggcctttggcaagtgattaggttatgagggttttgccctcatgaatgggatttgtacccttatgaaagaggcttgaaagagctcctttttctcttctgctatgtgaggtcatagcaagaaggccttttctatgagaaaagtgcccttgttagatatacaatctgttggtggcttgatcttgaacttcccagcctccagaaatgtaagcaataaatttctattgtttataaattacctagggtaaggtaagttgctacagcagcctgaatagactgagacacctattctttctgaaccctctttcagcttcttttctcattgttcttgcactattcatattgtgttttccactgcctttcttatttccaaatccaataggcagagttttttttttttttttgcaacatttttggttgtcacttattaatccagtggatacttaaaaattgtattttcataatgcataatagtaagtgatgtgttaggaaactcttcaaataaattcacttaaaggacaactatttgtgttgagtgactgaaaagtcaatgagttcatagcactaaacttgaactatttctcaggctatgtcttcctttggccttggctttttgataaaacagccaggaagaatcacccaagatacattttttctacatcccatcactttcaccagttcacctactaacttttatacttcatctttctagaagctctctccaaacttgaattccatggcaccagcctctctggactcatacagttctgacttattcatgagcagttctcctcctgttggtcttcatcaggttctacctcttcttactcttgtgttttcccggggttagctcatctcctttcaaggcttcaactacattctgatcacttcaagatgattatctctgccctattcatcgctcgcatgttccagacttacatttcactcttactggctatctccaagagaatctcagacttaaaacacccagattagactccttataaatctgtccttctcctggatttttccatctgagttaataacatcacaatctattcaatcacctaagtgagaactctgggaatttttcttaatgcttccttctccttattacctgcctctgagatgtcaataaattcttttaattctaccacctaaaaatagcttgaatctttgtaaacttgtttattgctactaccgtttccaggtccttatttctcacttattctattggatttagcctcttaaccgttcatttctgcctccaatccaagtccacctcaaagcccaataagcactccatgataaaaatttcacataatttctctgatttaaatcttcagctagtcttgggagccctacatcacccaagatactgactgaatctattatcctccactcctggctttttggtcctgttttgattttgcccagcccattgcctttttgcagcactgactagaacaacgatcgacacatagtagctccttggtatgggctaaaatgtgaaccctccaaaattcatatgttgaaattctaactcctagtgcctcacactgtgacagtgttttgagattaggtctttaaagagatgattaagttaaaatgagctcattagggtgggccctaacccaatacgactggtgtccttataacaacaagagataggaccaggaacagtagctcatgcctgtaatcccaacactttgagagatggaggtgggcagatcgctggagcccaggagttcaacaccaggctgggcaacatagcaagatcttgtctgtcttaaaaaagaaaaacaaaaacaaaaaatcctgggcatggtggcgttcacctgtagacccagctactcaggaggctgaggtgggaggatcacttgaacctgggagattgaggctgcagtgagccatgatcacaacactgcactccagcctgggtgacagagtgagattctatctccaaaaataaagaaaaaaaaaaagaacaagagattaagacaaaacaggaacagaggaaaggccatgtggagacaggaggaagatggaagtgaaggagagaagcctcagaagaaatgagctctgttggcactttratcttcgaacttcaagtcttcaggactgtgagaaaataaatttcagtaagtttaagttgcccagtctgtagtacatttttatggcagtgctagcaaactaatgatatgctccataacatatatcttaaggacatgaacaactttatcagataaatatgatgacaatttgagcttttggtgaccaactttctcagaatccctgaatcatattttaaggaaatgagagtggagcaggctggagaggacaggacttcctaattgcttattaccatatctcagcagcaaaaaactgctcatctctaggccttcactttggatctaagtgttaatgtgtactcttccatttaaaatgaggaagctttagcaacagtttcacctttggcaaattctttgtcaaaatgaaggaacacttatcayctgtaatgtgaatctttgtctccctccatctctgctgatagattgtgatttggggacacttgcagtatagtcgtccttcagtatccttgtgggattggctccaggaccccctaacccccagcggatatcaaaatatgtggatgctcaagtcgcttatataaaatagcatagtatttgcatttaaactatgcagatcttcacatatgctttaaatcatctctagattccttataatacctaatacaatgtaagtgctatgtaaatagttatgttgtattttttatttgtattttttttattttggggtttttcttttttcagtatttgtgatatgcattttgttgaattcatggatgcagaacatgtgagtagggagaggcaactgtattgttaacccatcagagactacattcattagaggttagttgagtaacaactgttgtaagagtatatgtaagtttaaaaaacagtaagctttgaaaaagataaaagtaagtcctggcatccagaagctggcctttgtaataaatgatgagccaatattgatgcattattactaaagttcataatatacattagggttcactgttgtttggacattctgtgggtttcgattgatgtttaatgacatgtatccaccattgcagtatcatacacagtagtttcaatgccctaaacatcctctgtgctccacttgttcttcatcttcttccttctctccctaaagcctggcaatcactggtttcttattgtctctgtactgttttctttttcagaataccatatagttggagtcatacagtatgtagccttttcagattaacttctttcacttagcaatatgcatttaagattccttagtgtctttccatgccttagtcgtgtacttcttattgcctaagattctactgtatgtatgtatctcagtttgtttatccattcacctattaaaggacatcttgtttgcttccaagttttcgccattatgaataaagctgctataaacatctgcatgcaggttttgtgtggacacaagttttcagctcatttgggtaaatgccaaggaaactaattcctggattgtatgacaagagtatgttcagttttgyaagaaactgccgaactgtcttccaaagtggctctgccgttttgcgttcccaccaacagtgagtgagagttcctggtgcttcacatcctcactagcatttggctttgtcagtgctttggattttagccattctaataggtatgtattctgacccattttttaccataataaaataagtactttgggataattagggagtattctacaataagaagagaatgagggaaataaaacaataactttaaacgtggctcctgggtggtagaccaggctcattccctgagtaaatcattggttttcatattctagctttctaggatgagattaaaatctgcacctaagagaaataaggaatgagaactttgggttactcattaaggttatatctgcacattagatttctaatgtacttataattttacagtaatagctctaaaagtagaaaggacaacaaaatatgtaatattcacatgggttatggatacttccacatatgagtatttatacttagaaacaggataacctccacaaaagagttttagttcctgcccctttacctaagtggacaactggttcttgctagtactttttcatacttctagtacttttgtttcctgtgttgtatttttgggcaaaaacttttgtgtttagcttctgtctgaaatgtgccacatgtttatttctttaagagaaaagggtgcatattgtcttgtgaataaatatttcattcatttatgtgttgtatacctgagaacatggcctcaaatataagaatttagctgaaactactgttggtttaggacagaagtacttcctagaatcagaaagactcatgctctttttctgtggataatatagaaaaacatagagttatgaaacacaatatattcttctgaaaataaagacaaaaccacatgacctacttcagtatctccaggtaccacttagaagtcatctttgaaccaagtgacacatggtcctgatcttctggacactgtgcagtgtggaagcagatctcatccttcctggaggttgacaggtctaacactttctaggaacgttagaattttgcttcatactaaaaggaaaaggaaatttgaagttgctaagatacacatgtgtaatattttcgttctctttttctttatctcttttctatttctctctccctcctcccttccttccttccttcctccctccctccctccctcccttctttcaatggagtctcattctgttgcctaggctggagtgcagtggcacaatctccactcactgcaacctgttcctcccagattcaagtgattctcctgcctcagcctcctgagtagctgggattacaggcatccgccaccatgcctgcctaatttttgtatttttagtagagacgagatttcactatgttggccaggctggtcccaaactcctgaccttaggtgatccactcccttcagtctcccaaagtgctgggattacaggcgtgagccaccgcacctggcccacatatgcaatattttcaatgtgttcgttttcagaagtctttctaaacaatgtcaaatttctttttactgcattcttaccacctcctaatgtctagcaatgatcaataattcccctgactgaaaaaccaaaagcaaaagtaaaaacaaaaacaaaacccataaaggtgactttttaaaattttattttaagttccaggatacatgtgcaggatgtgcaggtttgttacataggtaaacatgtgccatggtggtttgctgcacctattaacccatcacctaagtattattccccacatgcattagctattcatcctgatgctctccctcccccaaccctcaacaggccccaaggtgtgtagttcccctccctgtgtccatctgttctcattgtttaactaccacttataagtgagaacatgtggtgtttggttttctgttcctgtgttagtttcctgaagataatggcttctagttccatccatgtccctgcaaaggacatgatctcattcctttttatggctgcatagcattccatggtgtatatgtaccacattttctttatccagtctatcattgatgggtgtttgggttgatttcatgtttttgctattgtaaatagtgctgcaatgaacatacatgggcatgtatctttataacagaatgatttatattcttttgggtatatacccagtaatgggattgctgggtcaaacggtatttctggttctagatctttgaggaatcaccacactgtcttccacaattgttgaactaatttacactccccaaaacagtgtaaaagcatttgtaaaggcgacttttatcaagactcttgaatagagtcatcttgtgaaattccactttcctcacatataagggagaaagaagggcagacagaaggaggaacttgttcttaagctactaaattaccaagctttactggggatctgtctgagtaagagtttccaaagtaaaaaagctacattcttggagactattctagagacagatttaaacagaagtaataaagacgacatttggaactacgcatgtagccattgattgcaagtgtacttaggggcctttttgccaaaaaatgataacctacacaactttttttgctgtcaaattccagaatatagacttcagtctgttgaattttgcaggcttttatttgatacatttaattgaacatcatcattatcattttgctgatatgtcagggcagtggtatgtcaggaattttagctctcataacaaatttattcaactacttaaaactatttagtaatctacccaggataactaatccatttaagaagaacaaaaataagaaaaagtttcaataattaagaaacagtaaaatagctttgtgaagagcacattatttgctggattttattttctraattgtactgacaaaacaccagtgtgtaatcttgaccaagcttatgctatcttgtttccttaaatagtggttctcaaccagggatgattttctgccaggggatatttgacaatatttggagacatcatggttgttacatctgagggtggaggtgctaatgacatctagtgggtagaacccataaatgctgctaaacatcctacagtgtataggacaaccccccaaacacacagaattatctagtcccaaatgtcaaccttgtatcaaggttgaaaaatcctgctttagagaaatacaccacaaataccacattttcctcatatttaaataattttaatacatatacagatatctcatgaaacattcatctcaaaacctaagcaaaatacagttttttatatagaacattttctggtcagtgtacacacaagttgaatggtttttgaaaagcattctactgcattaaaggacataaataaataaatatatttattaagcttctctcactaagtaaagcacaccactgatacttcctcctgcttatctgatacataaaaggacattaagccatcatttcctgcagtttatgttccataacacggcagttgattagaaagatgtagttacttctgtttgaaaatgtagctgctgctctgccctctggctcactttgaaaatctgtggttctgaaagctcaaggtactatttttactcttcgtatttggctctgacctgtgagctacrttcctgcttctcatttcccttggtttggccacaccggtggagagtggggctgtggtgtgtttttttaaggttgggggaggggttgtagttactcagacaagattctgataagttcacgctcagggtggttttgactgaaaactagaatttataattttacaaatcggattctccttttagatatgtatttttattaaacatattatatcttcccatgaaaacagaaacatggcaaataataactgaatattgttgggcatttaaaaatatttttattgaggctcaagcttaatttggaagaaaattgtgaactatattctatttgtaattactttacatgcaataaagtaatttttccctgagaatgagatctaaagttttcagattaaattgaaatgaaagaatttttttaaaaagttattaattcatatgagctgttctgaagaaagcattagaaatgtgttaaagcttatttcaaaagggatcataatagaaaaataatttgacttaatgtctatataataaaggctaagatttttaaattgcctgaaactggtactgagctcttcattaaagcaggtaccatgtgcgtggacattttgatagccctttttagagtgctacagtcttataagggtatctatctatgaagttcctcaaggttccacatgttaaagatgtcaaagtgactttttattttctatgttctattataccactatgcatttttataatactcactggacacaaaacaaatgttaaactaggtttgcatttgtctagagaatgacaagatctatgctgactttcttttttctaacataggaataaatttttcatcaactagctatattcccagttatttcatcactcaacaaagccacaactgcatgaaagggctttaagcctgggacttttgggggtgaataagagcctgattatttgtttgggtayaccaagtttttagtgaaccatatttgaagtcctacaatcatatatatatttatattttttctttattgaataaatagaatttgttatgactgccaaaaagtacactattctgagcaaacaaaattattaccttatctgtcttctgcttcccaggaaatttcctttaaattttgttctaaaccttgactgttctcttgatcatttggccccaaacaccaagtgcttggcaatatcacctgcctgttccaatgagaaaatcaagaacacactgtgtgtttaataccccttagagatcagtgagagctagacgcacatttagaaatggtctattttgcaccataattcacaggcaaggaacatgagggtcaaagattttagtggcctaaatcctcagagttcttctgtagcaaagctaggattagaatttaggtttttacacatgaaaaaatgctcatcatcactggccatcagagaaatgcaaatcaaaaccacaatgagataccatctcacaccagttagaatggcaatcattaaaaagttaggaaacaacaggtgctggagaggatgtggagaaataggaacacttttacactgttggtgggactgtaaactagttcaaccattgtggaagactgtggtgattcctcaaggatctagaactagaaataccatttgacccagccatcccattactgggtatatacccaaaggactataaatcatgctgctataaagacacatgcacacgtatgtttattgtggcactattcacaatagcaaagacttggaaccagcccaaatgtccatcaatgatagactggattaagaaaatgtggcacatatacaacatggaatactatgcagccataaaaaatgatgagttcatgtcctttgtagggacatggatgaagctggaaaccatcattctcagcaaactatcgcaaggacaaaaaaccaaacaccgcatgttctcactcataggtgggaattgaacaatgagaacacttggacacaggaaggggaacatcacacaccggggcctgttgtggggtggggggagtggggagggatagcattaggagatatacctaatgtaaatgacgagttaatgggtgcagcacagcagcatggcacatgtatacacatgtaacaaacctgcatgttgtgaacatgtaccctagaacttaaagtataataattaaaaaaaaaatccctcctgaaaaaaaaaaaagaattttggtctttagctcctccaaatagtaacattttaagaggagtaatacagaatactccaattctttaaaacaagtgctcccttctctatgaatacaagattgagaatgggctcaaaagcatgacattttataaaattagtgttccactattttaatgagcaatatttaggatttcaatttacttgcataaaggtacatgataacctcaacaaaaagcctacatttacccaattaaaaaggattcagatggccctatgtttctcagggcaacatcaatggagggccgtttatctcatctatgttatctctaaatggaaatgtttatatcagacatataaaggcatatccatcattagaaatttaaaacaaaagtgaagattgtaatttattttcagtaacatgtacagccagtgtcatataatttaaatatcaattatactctgatttcaaatatgtctgttaatgttattaaaataaccatgtaatctttgcactgtatatggagtctgtttgagccaacctgcaaagtttcagattggtggaaaaagaaatatttctccatgtgtccacatatgaaaaggaatatagcacaatgagaagccagtacatttgactgcagaaaactgtcttaacttgctttgattactatccttccataaaacaaaccactactctgcaatgggatgtttaattggtgtacgttaatggtggttaaatattaaccaccatgattattttttctctgagttggagaaatttcatttattaagtgcattttgagtcaatagttatataagaataagcatcctctatctgcaaaagtttgaatgagataatcagattaaatttattacctttagaggaacttaatgtcaaattatactttaaggaattcccagtaaagctaagaaacaggcaagcaaattctgttgtttccaggtatttagtagacttaatatacattttattattagcatataaaccattagcaataaaaaagaaataaacacacaaaacatttgttcccgcagtaatcatgtatgctttagtaaccttaagatatgagctagaaaaattcatctttaaagatctagattcagtacttttatggaagcttgaaataccataactaatggattgaaaaaaccaacagctgcttctcaactaagatttatgatgttatgacgttgttattacattaaaattaaagtaacttcaaagttctatttagaaataattctttttggtttgctatcaatgaagaatttaaatgaatttatatytgaggttgctatatgtgtacacctatcttaacaatgttttccccccttccaacagctatctggaaatcttgtttgamatatacagatttttaattatctattttaaaactggaattgtgctgagtcttttatccagagcatgcatataagtaactctctgtatgataccactgttaaaatgagagaagcttatttcttcatcaaatctaggccataagttgctaatggcactggcgccattagcatgaggtgtttttctaacctgatcacatcatatatcacctgggcattttatgtattactgaattcatacaagaactcatacagagaaaaacacacacacacacacacacacacacacgtatagcaaagattcaaatctcttgaaatagtttgtattcattcacaatgatccttatggcatgtaacacactctgctatataattttgattaagttaaccaacaatttcttatatttaaagaaatggtataggcttttctaattctgagattctctacgagatggtatcattccgctaactgatttaatttttgcctacaatggattagagtcagagcacagaggaatgaaactcatgtgccaagaaaaagtcagctgtggccaggcacagtggctcacgccagcattttgggaggctgaggcaggcggatcacctgaggtcaagagtttgggaccagcctggccaacatggagaaacaccatctctattaaaagcacaaaaattagccagcatggtggtgtgcacctgtgccagctactcaggaggctgaggcagaagaatcgcttgaacccgggaggcagaggtttcagtgagccaagatcacgccactgcactccagcctgggcgacaagagtgagacttcgtcaaaaaaaaaaaaaaaaaaaaaaaaaaaagtcagctgcaactgaggaccagcccctgtaccttagactgtgctcctgacttgtccaggaacatcctgttaaacctgggccatctttcatggtgttcataatccattttgggttctcaaagtaaatcagtatttgtgcaattatacaatgtattgacataggtttgaacaaaacctataataggtactttgtatatccatttataagtcctggatggggtctttacagtgctctactgtttatactactatatttacaaggccttcgataaaatacaagtttaatacttggcttttgtggtacatcagttagttttcttttaagtaataaagtacaatgccataataatttagaatattgacatataagaccaaaaattactctcaagaaaatgtttaatgtaaatgaagaaaataattatacttaacatttagacaatacaaaacaattagttgcattgaaaagtttccagttaactaaaagtgccaaaatagccgtttgtattttatcatttaattaattaacaaactaaaatatgactttatgaaatactacttttaaaggtgtaatacagtggttggcatattttagcttaggtttctaagaagaaatcttagaaataatactagcagccagggcccatccttgctgatagaaaagtacatacccacagtagctacattcattcctgcagcacagcagatgaccaactggtaaatcatccactccaggatgtgatgtcagaggccaaaaggacttcttttattttattttgatcatgttattattggagaaagcccagctcagcaatcctgtaattacaatttccttctattttttctctcttgatctgttgataacgacaatggtagttaatgatcaaatttgatttatgtttcacatcaagtattccctcattctgttgagcatcatcttctccaagtaatttacctctcccaaatctgccccccaccccccaccccccaccaaaatatcagaggaaggtgcaagaaaaagcaagtgtgacatgtcgcaactagatttcaggtttccataatgtctgcaaccaacatatggaaaaggggcaatttcttacagcctgcctttgccatggtctctggagatgcctgatcactgcactgacagctcccaactttttcttgagtgcagttgttgcagatcttctgctttggtgattttgctatactctgattagttccaagagttttttgtagattctttgggattttctaggtagaaagtcatgatatctgtaaatcaaattagttttctttcttttaaaatcttagtaacttttatgttttcttgtcatattcactagttagtgtttccagtcaacattgaataagagtggtaagagaggatgtccttaagtatgatgttagttacaggtttttataaatgttctttatcaagctgaggaagtttcctctgttactagttttctgacagtttttaaaaattatcatgaatacacattagatttttgtcaaatgttatttctgcatcaattgacataattacattatttttcttcttttgcctgtggatgtggtggattcactgattgatttgtgaattttgaaagagccgtatatacctagaacaaatcccacgtcttgtgtgggattctttttatccattgttagatttaacttattagtgttgtgttgaggatttttgtaattatattcatgagagatattggtttttagttttcatttcttgtaatacctttacctggttttactattagcataattctgacccaagagaataagtttaaaaagagttctctctgcttctattttctggaagagactgtggagaatggctatttttttccctttaaatgtttggtaatttaccagtgaaatcatctgggccttgtgttttctttttttggaaagttgttaattattggttcaatatctctaacagataaagggcttttcaggttttctatttctgcttgtgtgagttttggtagtttgtctttcaaggaattgatctagttcatttcagttatcaaatttgtgagcttagagtttctttcatttctattattagtaatttgtgtcttctctcttttggttatcctggctagaagtatatcaattttattgatctgctcagagaacaagcttttggtctcattgattttctctattattttcctgttttaaatgtcattgatttacactctcgtttttaagttttcttttattctgcttgctataggcttaaaccacttttctttctctagtttcctaaggtgacagcttaggatgattttagatttttttctttctaatatatgcatttaatgctatacattttcctctacacactatttttctacatcccacagattttgataagttatattggtaatttcatatttttcaaaatatctaaaaatccttattgagatttttttgatctacatgttatttagaagtgtgctgtttaatctacaggtatttctggatttttgagctttgttattaatttcttgtttcattccattgtggtctgaaaacctgcttttgtataattactattcttttaaatttttaatggatgatatatggccaagaatgtggtctatcttggaaaatgctccacgtgagcatgagaagaatgtgcattttgctgttgttggatggaatattctatgtgtcaattagatgaagtagattgatagtgctgtttaggtcatgtatttcctaatttttgactgttagtaatcccattttttgaacttctctattctccttccttatattgtatatattcttactttggttatatgtctaaagacaactttccttccccctccctcgacccctgttgtgaataatttcagcttcctctagaactctttgcaccatagtgcacttagggggtgatgttcacatagaagatgaaaagttactgatggactgaaatgtactagggtgatcccttcaaatcagcaaggaagctgaggtattctagcacaccccaggagtgctggtttgaaaggctggctggtgtctagcaatggtctctgggaattttattaccagagacttgtattggttcttctaaaacatggtcattgtagtagcttcctagggctgccataacaaagcaccacaaagagggtggcttaaaacaacagaaatgtattctttcatcgttcagaaggctagaaatccaaaagtccaaagtctaagccaaaacaagcattctctgtccaagggctttagggaaatatatttcctcacttcttttagcttccagcgattgcaatctctggtgcaccttggcttatagcagctgcattactccaatctctgcctctgttgtcacgtgtcatgtactgcctcctccctgtgtgtctcctctgtgtctctgtgtctgccatggcctccctttaaagacaccaggaaatggatttagggtccaccttgacactactgaacccggtagagtcctcttactgggtaacaaaaattgtcatgtagaaacattttattgtggtctctaacttctcggggagttccctaaaaacgtttccagaatccacaggaaattcacacagacagagaagctgaaagccaaagctgacactcagcgtcctcaccgtgttgcgtagccagtttatcccttccagttttacatatccccagtcaccacccctaagtggaacatagcatacaaatctttcagctttccatagaccccattttctcaccagaaattatgttctttgggtggggaagcattcttatttaatctactaacccagaccagaatgtgataagaaatactgttactcttgtaagagtaatagaaatgaataaaaatgcattttaaaaggcaccttctggagctgcattcacttgaatcaaaggctgaccctgcagggttggcacggcagcagctgctagaggagcggttctggagcaaatgggcatattcccctttctgaccctgccaagtaagtggtttcctaccttgtctgcatttccagctgactctgttttccaacagcttgtttgtgtgtgggtgtgcataatacttattacaaagcgaggtggctgtctgccatcattagcataatatgcgttggagacaatttgccatggataaagtaggtccctttatatttcactgatttttttatactcaaaagattttattgcatgtttttttaaaatgcatacataagataaaaataccattttgtagatgcttgaatcaataaagttcttgtaaaaagaactgttgytgaatgggacaaaggaaaaggatttcattttattacctakttctggagctgctattttacaagtattgatgtttacatgcattctaaatggaaaaagagccayggcaagcagccatgagaatacagatagaaaacttcatgttatgtaactattattgttctggtttaaagaaaaattggatttgatctatttttttcatctactcctatggttaaaatatattttgatttcacccagtttttattgtgctaattgggaatacacacacattcttgtctatacaattatttctgcactcttgctctttaaggaagataggaagttaattttgtggtacaaaaaggaggatccaatgaatccgatttgccatgtcctgggttacacaaatgaaactgctgttgaacagaaggaagagtgagcaggccaaatgctcaaactctcaacacaaaggcttgttcaccctgaggagggtcatgcctccaacctgcactgatgctcagatggttcatgatgttatacaaactctcaccatcaaaaggaacagtgctgtggagattcatggaaaaaggccaaaatcacagctgtgtgcttcctgtttttgaggttgaattcatgcacaactgataacattcaaatctcatctcctgtgataagcacagagaaaatgaattgtttttgctttaaaaaggacactttcatttaagtcaacgcaaatcttttagctttccaatgcaactcaagattccgcttattataaatggaaaacagtctgtcatgccttggcatttacattgacacaatatcagagcatactggaaggagatattttattttgtttcaactaacttatttcatggctgcacttaaaatgctgtgcatacaacaggagtttcaaaagcttcagatggtgatttttagtaagaaatggtcatgaataaagacaaacataaagcagaacaaaataagatattctttcctttcttcatttggaattcaaatactcttaagttcttggatttggctttctttatatttacaagtttgtatgaaatactggtttcaaataagatctgttcacagcccagactactgagccccagctacaattaaatattgatcatttacgtagtgttctaaagaagtacataaattctggttttgacagtttggatttagtcatagagagtggaggcatccagttcctcataccggatgatgatttatgcctaagtacatatgttttaaaatgttggaacactttaaaatgttggaacaatattgatccaggaacaacaatcctggacctttcctctttcctccttactattattttagtccgtggagccagcatctatttttaaattcaaattttcaatcagggtctagcccagagggtctggagggttctcacacaagttttgcagatgaggtgagagattttcatgagtgcttcattgttagggcctgattcggattgactcctgtctataagaagggagaatcatctttgtctttttacatttcccctctcctccctctaaaaaggggagaaaaacaagctaggtttatctttgtttacctttggcaacaattcaattcaaaagagtttactgagtgtgactgtgtcttaggtactggcaatacaatgacaacagggctgtcatgaatcctgctgataaggttcttacagcctagccagaggagactgatgctcaaacctgcgattcctttgtgtatattcaggggcgtggctgggcagtgcaggtgctgacagtgcacatggcaggaccatctactctggacttgatgggtcaggaggcttcccaggggaagttgtgtctcagcagaactggaacataagcaagagttaagtcacatgaagatagggtggtgaagatagtaagagagttataggaagaaagggctggagagaagagcatgatatgttaaaaccctgaagttaaatgtcactttactaggggttgggggtaataggaggggatcaaaccgaggccagagaggggaggccaggttgtaaagggtctatgaactacttgaggaaatttaaatttgagcaaagcagttagaagggtcttgtagtcatctattttaagtatgtgtcttgattatgagtgatagaggttaccattattgattaatatagctaaaaaattttctgcatcttgttcaaatattttaaatatcatagaatattcagagattcaaatgtacagattcctacagtaaatttctcttggaattgagtgtgaaaaactaccaccaaatatttatacatccttttattggaaaatcaaagctggaaaactcaatgattttgccttatgaaaacttaaaaacattttgttttgcagttcttcaaagtatcaagtatttataatttgtttaagagtttagaagttttaaaacgttttctggtgaaaatcttgagtttaattttcaccagaaaacctgctagacaaattctaaaagagctgtaacacatgtaatttttaaactttcttttcattttagttttcttgttgaaaatgttttgatattactaaccattcaggattttctctagaagtaaatggttataaattatgtatataccttaaaatagaaacaacacttaaatttcctaggtcttacatttttaaccagtaactgcaattgatactttcataagaataattatttgctcaagacagaaatcccagcaaaaaggaaaatcacacttaactttttgaaattaaaacataaccagaagaataactgcgtaattattctttactgctgtgggagtcaatcaatagcccagatgaataggtagatggataggtacacagaaagctatctgtactatatcttgaatatcagcatagtactcttctgatctttgtgctcccccacccccacctttctctttctctctctctctaaaaatggattttgcatgcttttttccatcataaccatggatgcatatgtatctcattctgctccccaaagagttaacatgaacaagcatgcaatagagaaagcaaaccaggaattcccatgccctaacaaccccaacacacaaattcaaccatgttgacaaaatgggaagggagatcctgccaaattaataagaaagagaaagtgggaagagagacagtttgttaccgggtctcacctgccttctttgttcatgaataggtttttactctttagcttcaacgtgggcaacagcagttaggcaagattcacacattatttgaaattggacaaaaaggatacaagaggccggctatggtggctcatacctgtaatcctggcactttgggaggctgaggcccagcctggccaacatggtgaaacctggtttctactaaaaatgtaaatattaggtaggcatgcctgtaatcctagctactcaggaggctgaagcaggagaattgcttgaacccggaggtggaggttgcagtgagccaagatggcaccactgcactgggcaagagagcaagactctttctcaaaaaaaaaaaaaaaaaacaaaaaaaacaaaaaaaagatagttaagagaaatttcctagaatgctgtgtatacaagcttttaatatagttctatcaaaatttagaaggaaactgagatttaattttttaattaaattggatatgcagcccaagaaagtatacgccaactttttacttgactacacatttcacatcttcagataacattcagtaactttttaataacaacttgaatacattacatttaaatattttgattatttgtagacagtcttccagcaacataattaatttcttcccttcatcaaaaatctgtaatgaattattctttcaactaaagattttcctcagcataataagactacatttaaaatctaagaagcaaatgcttccctacttcaagcttatttttaaaaggaagccaaaaaatgatcttttctgaataaagtgtttcagaaaggcatagaatacttcaatattatagtaataattattgtaaaaggatagaattcatctcataccattctattacgtttccccctagaacaaacaaaatgtatcctcctgagtttaatttcaagtctttgaaaagaatgcagtcttcagaaattagataggaatttaagctctaattcataaaacatcactttcctccatggaactagttgaagattacatattaacagcactcctttaatttaatattctaaaaaaacagcatctaaaaaaaaagaaatagtgagcaggaggccggtctgatgacaaattacattaaacaatatcattatccttagccctcagtgttttccattttccagatgtttaaaagacacaaaatgaaaactctcaattgcccaagaggtagatgatgaactcattttccagacaggaaactgaggcaatgaggctttgccataaagtataaaaatggtcatcagcagaatcaagattagaagcagaaacacctggttacacattgctgctcaaaacacatcaatagaatgtcaggaataacgttggttctttcttgcaacctgtgttccatcttgctgtatgacatgcagagctgacaaaagatggaaactctatttaaagttgatggcacatctatcctccaatgtcaaacccgtgagagcaacatgaggaatgattatttacaatgacatcatcagactcaggaacgtagtctacgttgaaattacacagaatgcatttcggtaacaagatcaagacatggaaagcaaaattaaaggacagctaatgcaaaaatacaacatcaattcaatagttctactgatattccctacaaagggatgttttaaaatacaattaaaaatatattattgaacaaccatatttgaaatttagcacatttctatgccgatgtcagccttcatctgcacgcccttaaattaggagggaataggcatagaataattttgctgcatattatgttgaaaacatctgtttctagagtacaaaaatctgttcttatccactacagataatttaccaagcttctcaaatatattaaacgctccagaaaatttgattatttcacctagcagtggtattagccaaacaagtatggtgatcagactggagatacacttggtgggagatgctttgcaggaggtgcaggaagataaacggcggcacttttctttaggcacatgagaatgatgtccattggtgccaacaccacagttattgtgtgaggagccagtacattagggacacactaacatagacgacacacagggttatccagtttactcttgtgattggcagcctgcagttacctgtcacgtggaggatgacattggaagagagagcgccgctagagttttgggcccgagccacatagaggcctgcgtctgccttgcatacctttggaatgaacaccgaatgccttgtctccttgtgtaaaacctgtaagtgcccatctgcagacaatttctggcccttcttgtacctgaagcagagaggcagtttttaaagtcaggattgctgtttattcacattatttccaagttctaataatgcttgcaaataggcccattaccactgcaatattctcttaggattagtaggaaccttgtagccacaacaaattccagtggggctctttatctttttttctttagtaggctagattgcagtagcagaatcagagatcattgcggtctcaaactcctgggatcaagcaatcctcccacctcaggctctcaagtagctgggactacaggcgcttaccaccatgtgcaggctaagttttttattttttattttttttaagagataggatctcgctatgttacccaggctggtcttgaactcctggtttcaagcaatctgcctgcctcagcctcctgagtagctggtattatgcgctgtttatctttcaagcagaagttggcaactggtggcgagagaattgctttgactggctcagacaatgtttttggaaaactgaattttttgaaatcctttaaaaattggaatattgcatatgaaaattcagatatccagctacccctaaaaacaaaaacaaaaacaaagcagaccatttggtcacactaggccaccatttgctcatagtaacaattacctagggtgtgaaatggcaccctcatgttgtccagctttattctttttgccactctggaacagcagctgtgactccttataaactgcatgggagtgagactcatctaccccatcatattcataccacagtatccacaggacaatacagatgtgctgttttagaggactgtacttaatatcacctcctgatgagatcacttcatttaatttttttgaagcaatttcattagaagaaaatgacttctaattataaaaggtatttatgcaactgtattatgactattaataacatatttctagaaggttcctatgaacatgagtgcttaactgcatggttttataaagaaataattttattttgtatgtctgagattcttgtttatttatttctacccacaatctatcactcaggggtgatgacaaatgtgaatcgttttctgttcccattgcctaagtgataactttgccttttcttgggtatcctaagaatgtatgatatcctgaaagcttgtcagttattaattgagcacagttgtaaatctgacgacaaaacatttgtttacaacattgcaatattcttcaacgacacgtatgtagcagtgcttctttaaccacacacatactaaccaaattattaatatttactgtgtggacaaaaacaagaaacacatctgacaacatttttctttggagtgaactgagatttaataatgaattaaatatctttaaaattcataaatatgacactcttgatttgtaaaaaacatgcaacagtaaagacaataaaacaaaaagcaaaagtgactgcactaatatagcacaagtgcagttttttaaataatttgagaaaccaaagttttctcataagttccttagataactggttcatatttcaagtaccatcaatgggcacacacaataactgaaactgatcatttaatatctactgaaacattgtgatcaataaatgctattttacttaatcttagtttataagtataaactggcttttgcagatttgtaactttgtcctgaaataaatttacttaaggatgagaattttctaaatgtttaaaagtaacccacatattgagaaagaactgcttttgttaccaatagtaggtgatccaaaaccagtattctacagtttgcttttactgaaaaaaagaggctaaaaaataatgatgtctccagagtgaaatcatattgtttacagctcagttattatactacctttcaaaaatgagtttattgcctgtcacctggaggaactgtgacagaaatatttatattccacctctcacattgaaaaaatttgtaaaaagaaatcctagtaaaacaaaatgttacaaagatgacacgtgtgactctgttggaaagaggaaaaagatgaaagaggtaaatgagagtaaagggaaataaaaacaaattcttatattttcaattgcataaaggtagttaaagcaagcagatgccatgcttatatggaaatagacaataaaaaataatttcaacccacaatctttagaaatgtggaatgttaaacacagaagaaaacaagcacaaccaacctacagtgctttggaaatttgttaaattattagtactttatatggttaccttttatttttcttaaaggtattaactatgctgctactaaaatgagaggggtctgatgtgagattgaatcatgcagagttgcagtgtcatagaatattaatcagctagccctaaacctttcagttagtgctcacagaatgatttttctctgtgattgaatttgtttccatttatggcttgtcattataggctacccaccatgtcagtgtaggctctggaaatcctgttacttcaacttccaaagtcactggagaaccttccatgacagttacattagacaggagcctggagaaattaggtgcctggtcagctaggctgaccacgctgctctttgctgatgtgcttttaatctcttctcgaggaaccatttgcctctgatagcccctgctggtgcctgattgaaacctgaggcccgagaatgcatcagaggaagcatgcagcctatcttgggttttagtgaagttattatcagcatgcattttctcccgtgtttctagcaaaccaccctgagcctgagggtgctgctgtaaagctctctcatgcacttcactcatcatgctctctggatgttcagcactgattctgtgtaaggcagtactcttttccacgaatcctctggaggttagtgggggctcagctttgaactggaggtaaggcctctcaaaatgacttgaaaatgtttctctcttatcattgcatgcatccgcaaaggcaacaggtggtggaagaacagattcctgggcatcccctgggctgctggtcccagcctgcaccccatagctgcttatgtgaaggctgagggaggagctgacaggctcttccacctccatgtcagatggtgcaagaggggactcagggcttcctgggagaggaggcaaggagatgtcatcaggtgagacacactcatattcttcccctgagagcatgtcttcaggcaggagcaggtcctggacgccaccctccttgtcagtggacaccttcaggtcttgtggtagtcgctcttcccctgttccattgatgcccaaaagatctgccacctgcacctgccccttgaaaaaagaaaagccaaatcatccttattcattcatttttctttttccagtttcaattacagtaaaactcaacttcagagagataactcgagacaacctacaaggttaaaatttagggggctggagcaagaattayggatgagaaaccatttgtctgtcgatcctgagcacagtcccacttctcatgactaaggaatcattataaagacctcaagttctgagtaaagtgtgatagacattgtgaacagaagagagaaagccctagtttccatctgtagtgaaggggttggactagatcaacatctttcaaaccatgatctggggagtcttctcaaacagcaaagtcagcttaggtctggcttgtctacacacacatctataaacacacagatgctgaccatcagagactcccttgttaggtgattccttggactctcccggaataacctgtcctttctctcaagaaaaccatttctttttaaaataaattgtagtgaaatatacataaaatgtaccacttcaaccatgtttaagtgtacggctcagtggcattaagtgcattcacattgagtgtaactatcactgccatccatctccagaactttttcatctttccaattgaaattctgtatccactaaacactaaccccctaatcttttgtcttcccccgactcagcctctggcaaccaccattctattctcttgctctatgcatttgacccctctatgtacctcatatagagaaagcaattcttcatgactagttttattttcttgaagtcccttagtttattcttgcattgaaaaaatatttattgagcacctactgctatacactaggaaccatgctagtattagaggcataatttggtgaatacaagtagatcagtctctgcagttgaggagatgatatcctagtggaggagscagatattaatggaacaatcagacttgatggcctttcccaagagagcacatcaagatacaataggaaagcacctgccacttgtctctgctccaatctgagtgtagtcctgctaggagtggtgagtagcagtacttctttctctgcttccactgtcctagtctaatccacatccatctctggtttaagaagaggctcaaatgtccctgttgcatagactcaaaagaacattgaagctgaaaagcgatcttatctatccccacctgctggttttatatctcctttctgtgccgttcctcagcattttgggtgcctacttacttagtatgtactggtttttgtcctgcagtaactgatgcatataggaaagtcacatcttgccttgcctttgagtttttcattttagcccgtagtcctgctgttgatatacattttgtaagtgatttttaagaaaataagactgggtgcggtggctcacacctgtaatcccagcactttgggaggccaaggtagggggatcacaaggtcaggagatagagaccatcctggctaacatggtgaaaccccacctctactaaaaatgcaaaaaattagccaggcgtggtggtgcgcacctgcagtcccagctactcaggaggctgaggcaggagaatctcttgaacccagaaggcagaagttgcagtgagccaatattgcaccactgcactccatcctgggcaacagagtgagactctgtctcaaaaaaaaaaaaaaatagctatgtgtggtgatgggtgcctgtaatcccagctactttgggaagctgaagcaggagaatctcttgaactcaggcagaggttgcagtgagccgagatcgagatcgtgccattgtaccccagcctgggcaacaagagtgaaacttcgtctccaaaaaaaaaaaaaaaaaaaaaaaaaatgtgttttcaggttgaagagtcgaagcaaagcaatgttgcttctactatcccacagagattatctctcctcagagaaacattaacccaacttagcgaaagtggtttccttcagccatttactaaaagtttaaattctgagtctaaaacccagatgttcttagaagttcccctcattaaaaagaatattaaattactaattgcccctccctcttttggctgtcgtgccacagcttagctcggtctctctgtccatctcttcatgaaagtagaatgcttattttcctccttatggggactttgattaaccacctattcagtctaagaatctccactacaacattttggcagcctctatttgaacactttttctgaaagagtactttgagaatgtgtgccttacttgtgttaagaatatcttcctatatgtagcaaagatctgccttcctgcagtttccaccaatggatctgaattggcctcctggagctacacaaaaagtccagctgctctccaactttaatagctctttgactgtttggagaattggtcctacaacctgtctaagcctctttctctgtaccagacactctcaggtcttcttttgcctcaactctctctcatcatcttggtcatttctgggaggtcccactcctactgcgccacaagatccttcatagaagagcagggacatttgttgacttgttggccttccaggggcagacaatgacaactccttaatgacttcttcaggtaacctatgactctccacagaagaataatgttttagaattgtctgaaaacttacaacaagcttaggagagaaacttgaatacaagtccagacccatctcccaactcctcaatccctgctggggaggaatttatttcctaattgagggtttggaagaaggtactgagcatgctcagatctgtctctatgaggccctcacttttggatttgcctttcatgaaatgcatgggttcaggttggctctaaggcatgaaaatcccccggaggtgaagtctgtggtcgtctagatgggcacccaagtggactgggtacatatttaatctatttaaatcaggcatgaagtttagggaaacccactagaaaagtccaagccatccagctttaactggttcctgactcctgtatcttactttcagctggtgccaaacacatgaaaggaatataaggctatcattttttcacttctaacaattcctaaaatagaaaaagtactttcctcaaaaaataacactacccaataatttctactatcaataagaggaaaagagttttctcaaatctttttctggaaccatttaacttcccattaaacatgtttgtttctagagttgtttactttccagatggtaagtaatcagtggaatcatcatcttcttgacttatatgatatgtttttattaaggtgattgtattagttcattttttaaaataaaaatcacatgggaccattgacttatgctgaatttgtagtcaactaaaatgtcctacctcctctgtccattaatgctattgatgaaaatgttgaacactgcagtgtttagaacaaagttagatatctccacaagacagattgtctccaaagttgacgttgatgaactacttaacactcttgagtacaattataacttggccaaaccctcattcagtacacatttctccacttatcttaagagagcatcataagtgtgtttatcaaatgacatcttgaaaccataataaattatgcctatggcactaacctagaattactcattaaataatcatctcgggaagcaagataaggtgagtttaatatatatgcaagtggtcttctgagtaaatcaatttggctcttggcactactgcttttattcttaaatgcaaaatcgaatgcattaaattatcacaggtacttcaaaactatgtacatctattatgtatcatataaaaattaaaaaaattaaaaatgcaaataagatttccgtttttaagtcattatggaattttatggaaacattattttattttattctcatttttatttttgagatggagtttcacttttgttgccaagactggagtgcaatggcacaatctcggctcactacaacctgcatctcccaagttcaaatgattctcctgcctcaggctcccaagtagctgggattacaggcacccagctaatttttgtatttttagtagagacggggtttcaccatgttggccaggctggtcttgaactcctggcttcaggcgatctacccgccttggcctcccaaagtgctggggttacaggcgtaagctacagcacccagccagaaacattattttaaaactcactgagctatattttctagaactgtctagttttcaactatgaaaatgctatccaaacatttacatatactaattatttgttaatattttttcaccataaaaccatgtttgttattaccaaaaaaaaaatgtgtgtgtgttatttacccagaaaagtttaaataaatttatggttttcagtacagacagggcatatttacatcagtctaatgagttctggcaaaatagctgggaaactctgatctaattcaccaaaacatagctcaactctcaatctgcttttcttatatcaaattgagaggctgatctttgtctttttgttgattcctttttcttttcccaccttctaaatatatgaatggcctgcagtcttatctttaagttctctaattgtctctatattccttgcccctcaaacatcttacccacttacatatctagtaaacaattagcttttaattaatactaaatctattagcttcaagtcttatctctgtcaggacttctgaactttcatttctgctgatgggcataatcccttgcatttaaatcattgccctgtaggcagaaaaaatgtctagaagggagaatacagtgatattcctacatccattcaactaagtgggcagaaccaatcctcaaagtccatagagcagggaactacatatgtggtaaatttgaaggaacactacaagattttatcttccaaaatacctccataacagatagccttactttagggtaaataagatttaatgaaagtaagtaggaagaacacaaaggaagatattaagcataggacttggtctgtaaaacacatttgtagagaaggcccttagcgggggctttagacaaaaaggggtaatgtggtattttggggcactttaggtggacaaggtaaaagaaaagggaacagagaggtggtgaagaagaacactaattttcttcccaatttctttcaaggcaagtgtttcaggaacatcttcctgtacctgccgggtgatcaggattattgtgtgtgtgtgtgttgagggtagagggggagtgcagggaccctcctcacctagtctgataagagcactccactgaattctttggtgcaaaaaatatttccatgctattgcttataagcagataaataggaagaggggaaaagtttgtcatggacatctacagtatcattacaaagcagcttatgtatacgcaatagttcctgggrgctcccattttggtcttgygggaaaagtgtatggctaaaattcaggagaattggggtgactgccagttcttacactactttctgtaatttttggaggacaatatattcaatcccttttggcctcagtttcctcaactgtaaaatgatatttgattaaatcccttctagcactaaaattctataactctaaatgctggcatcaaaagccatcatcttccaccaaatagttgcacgactttaggtgagtctgttaatactgtgtgcttccatttaaccttaggagttttcatatcttcagtgctcacattgggaataaaacaccatcactaatctgttagcagtgctacgtgtgttgcatttagtgaattgcctaattccacctgctgcatttttgggtctgaaaaatgagaagtactttgctatctccaggaaaaaaaatccctgcattgaatatattcttatagtagttcagtggaactattctttccaactcaaataatttcctcaggaattctaccatcatttaagggtatcagaattgactgcaataataccaggacaagcttttcacttggtgcttcctatctgcccacatggggttgtggagaatcattacatctgatctacatataaataatacagacaatamgagggtaaatgtgattgagctacttaaaagtgaagattactgccaccttttcattttgctgtctacaccaattgcaccaggacataacatgacgttaataacaattcttgacagctgtaattgtagaccktcacttacacccaaaatgactgatgctccaaccttttagtttgtattagaataaaagttatttttccatgaaggtaaatcttgcttttttttaatttaaaggaatctgtttcttctaacaagaaaataaaagcaagaaaaactacttttactaagtataaattatttttgtttgctttggtagcaataacttttgtttctgagttcttagtaagtgtgtctagttcacaatgtaggaaattgtgcagaactaaataaaataaatgatagggtgttggagttagtaactcttagaaacctttttaagaaaatgtggtgcatttaaggctattctttattgtgtcgaccactcattctcaaatgaagtgattttagtataatagatgctactggcatctagtgagcaaggccaggaatactgctaaactacaatgcgtaggacagctccccacaacagagaattctctggccaaaatgtcaacagtgctgtggttgagaaaccctgatttagaccaatcagagtaacgtaaaaccatttgatacaagagtagcatccagcaaaatgaccaaagtttggcagctctcctttgcctcagagaggaatctgggtttaagtcgctcaagaccctaccacaaaaaaagacagtttgcttaacactacttgctgcctgctggttgtataactgcaccaggccttgacatagattaacctgtggaaaaggacctataagaaagctgaaagaaccatactgacttcaaggaaagataaatctttctccacaaaataactgttacaaatggagagggtttttgtttgtttttaactctcatgtcacaagaagtgtattttattaatttgagcacggttcagaataatgttgactttgattgttccttcagctcctcaggagagaaacactgggagcaggcaacttggcaaagcaaaaagtcaaaagctaattatagtccagcagctgtgaatagagagtgagcaacttatgctgaaaaaccatcttgatgttgtgatttaaataacactttcaaaatcatgatacatttgcatttttgtgagtatctgtagtcgttacatgctttatcagtaagtgcataagtgttacaataatttaaatatttctctaaatactttagtatttatatttcagctggattctatggtttgataaatgtgcctggaaatatcatcttagaggtagagtctatgggaacaagatatgatctaatttcacgtattaagctttgctaatgggttgtgtaaaacataaaaatcatggcttggcaatatgataaaaagggataagtaaaatttgaagttggattggatataaaaagacaatggaaaaggcagctagagatgggaaaaacaagtggtttggggtgacatggcatttaaatggctgtcccaatgctactgtgaaatgtcatggtttccagtactcgatagtgagaagctcagaggaaacagcacaacagagagaagaagcaccaatagaggagcaaaaggaagcaagggaggaggaaactcacattgcatttacactgggaaattctatttggatagataagaaagctgcaattcacttttattttgcaatggacaatgactttaacctcaaagcaaaagtcctcaatagctgaggttaagtagttttctttaccttattcctttcttcattgaatattgtctgcttattttttgctggttcctttagcaagtcaatgtaatcataatggaagtcttccaaattcggattcatctttaaaacatctccctgctgtacaaagcaacagttagtgagagcatgagccaggaaagttggagaacagtgccatacactaactacttggaagaaaacatagaccacttgcaacctttcagcaaatatattccacaagagactggtgtactcccatgatgtgatttataaaattatccctcccagctcacagtttccctcctgcctcattcctttgatagagttcattgccagtaaaaattggttgttgaaagacccagcaggaaaaaagtaatcattataataggatgcttctgcaggagcattctctagagaaaggaatcattatgcatggcagtgtaaaccattaggagagtctggggagcagcagtgaggtagaaatgattaaagatctctaggggagaagaaagtaggaaatccagagaatctacacaagcaaaatactggggagactcttgaaaagaggaataaaatatcactgagtatagtaaagaaaaacagcaattgagaacacaggatgcktcatgtggttgaagatattttgttccctgcatttcatggggctcagttttagtcatggaggtagtgggggtttgcaaagtactgtggagtcagtgcaagagccgagaagactttgtaaaggtggaaagaaccactggtatcacacatgatagaacacaccagtttagaatgatgattatactgcaatggaagagtctctattccacctggaataaaatccttagatgagtcttaaacaaacatgcatgctcatcaaaatgcatatgcaacactggctcggaggattcagggagacccactactggggagattctgctttcagtcccaactctaaaccgaactggtttgtgctgctcaatgagtcactctgctttggtatgcagctgatatcttattccaaaatatcagctggtgtggaaagaatgctagattttgaattagatctaaattcaaatttcagatctaccactattgactattggggcccatgtaaagcactcttaccctctttggacttttcctttcacctctacacagaaaacatttgccttcttttcgtctcaacattatttggaaatcactggagataatgtatatgaacgtcctttgtaagtctcaaattgctatacattagaaaggatttctatcactatttaagccctgacaggaattgctgagcccattttctataactttgaaaagagagccatagcatcaacctttatatttaataacataaaaaatagacatttgctctcttcatacaaacacctgtaaagtgctggtaagcattctttgggaagcgtttgttgcggctgtaactcataaagataatgctgatgcctatttctcttgccagagagaccctttctcatttctacatccacccaaattaaacatcttcaagcaatgaatgatagttcttctctgtaccaatccattgggcatttactacaaatgccaaaactctttctggagtacctgctttagaaagcaaagcaggccaggtgcggtggctcacacctgtaaccccagcattttgagaggccaaggcggaaagatcacttgagcccaggagtttgagaccagcttgggcaacatagtgagacctcaactttacaaaaaaatcaaaacattagccgagtgtggtggtgcatgcctgtggtcccagctacttgggaggctgaggttggaggattgcttgagcctgggaagtcgaggctgccgtgagccatgataacaccactacactccagcctgggcaacagagcaacacactgtctctaaataaataaatcaataaataaatacaaggcaaagcatagtgttaaatattgtgtgggacactaaatttagcagcgccagagggtttccttaagtataatcaagtagggagggttgggatggcaacagcagttatatgtgatgtaattatatgtagtagttatatgtgggattatactagtgttatagcctgaatgtttatgctcccccaaagtttatatgttaaaatccacatccttaaggcgatagtattaggagatgatgcctttgggaagtgattaggtcatgagggtgaagccctcatgaataggattagtgcccttagaaaagaggcctgagagacacccctcattcttttaccatgaaaggttagagtgagtagacagctaccaggaagtcctcactagacaccaaatctgccagcatcttgatcttgaacttccagcctccagaactatgagaaacaaatgtctgtttttcataaggcatcttgtctatggcatttggcatagcagccaggatggactaagacaggtaggaaggcacacaagtggcatgggagatcagggagggagtgatatagctaaggaaggatttatggaggaggcagcatttgggtttggctctgagagatggtaagatttcgaaaaacagagacagaaggtcgtgtccttgaagtaaaggtttagaagtgagaaatcccagggagcatagtagatcagtgggacacagacctacagtgaatgcagaagcacaatggtttggaaaggtgaccagcttcagaacattgaaaggccttgaattggaacttgactkggtaaggaagagtttgtagtagagtgttgtgaatgtgaagatgacactagcagaactatttaggaagggtaatctagctgggagtataattaggggactcctgactactgcaaaagagaatccaagtgacaggttgagcgtgagaaagagagaatgcaatcctgactacactgagggtgtaaggaatggagaatgaggaagtgggagaggctgtggaaacagctctttcaggaagaatagccatcaaggtaaaagctggaaagggatataacttgaagaaagtagattttatgaagctgaccctcacttgaagatgtgcaacgtaaacgggaggaatattgtagacaatgaagagcaaagagtcggaggaagcactgattttcggccttcgtattggaagtcagaagcagcagcagctcctcggtggtggggtggaggtggggaggaaagaataaatgttgaaaaagataacatgagatatgtggtttattatcattgtgaaacaatgatgggaagcaaataacatacatattagaaatattaatcatttcatatattaaaaatttcagttttctcaaacctgattgtagaatttatgtgtgggtaataatacaaaagaaagaaaaagctatgcacgaagatgttcattgtagtgttatttaaaatggtaaaatggtaaaaaaaaatctagatttttaaccaaaggataaagataatttggttgggcacccactgaattaaaagcctcacaaactatttgaatagaagaggcacataaatttatgacatggaaattcctacagaaaaaagaggctgctagaaataaacataattctgctctgaactgcaagaccaccactaggcctcaataacaattatcacaacaataatcttgagtatcttcacagtcaatcctccgggctaccctgggatccactttgtagatcaggaaacaggctcagggagattaaataatttacccaaggtcacaaatccaattatttagggagttggtatttcaaggcaactgtgctttgctctacagcctttgatcttaatgaccttgctgttctccccatcctcaacaaccagttctttcagccagctataaaaacagcattaatcaaaccagtttttgacatgacattgacaaagaaacatatgtatttcactttaactggttttgcttagacataaacatattctccatatttgttaccatcaaatttgtattctacgaaaagtgatcatgattagtttactatttccatgaggaaaagtgttgaatgaatataatacctgaagattacttgtattttctctggtgccacaatttggagaggaaaaaaaaaccctggcatctattatttatgaacaaaaccataggctacttaatacaaagtttactggcagagtcttaatgggacacattttttaggatatgatccatgaaaatgtaaaccagacaccttaattgtgtttagccttcattaccagcaatatttttctctgcagtgatgggaaagaaatagaattaattatcacaaacacccagataattatgtttgaaagctgtaaaacaaatgtgcacattatgtaccctgagaaattctgttaaaatgtctttgcaccagaagacatttgattaacacatttttatttattttgcttgaaaatacatattctaggaagaagaaattaccttcagtttttcttcgagctctgtgagggactcacataattcagtcacagattcaagaacctctttgtgttttgtcactattttctcaatatatttctgtccttcttccaaacctggggaggagaaggatgaaactagttttaaaggtcaaatttttagcaagaagaaaagtccaggtataaattcatctccctgtccagtgtaagggctgataaattgtaagttcttaataaatatttgctgaagagataaataaatgaataaagacaagtttctaaaagctagatattctaggaaaatgattacatttgctgtaccacgccacttgcatgtaacctaaataatgttgctacatgaatagtcttaaagctcaattctccttagtttttcctgttcaaaacattcagtggttcctctctgcttagagaagaataaattcctcaggatggcattcaagtcccttccataacatggcttcaatctgcctctcccaaatgtatgtcactctagttctctcctgtattttatctccagccaaatggaaccagcaactcctccctgaagatccacacagcagctgagtattccttcctctaccaggactactgtccctccactctcaatttctgctgtcaaaatataacctactctttaaggtccacctgaaatgccaacatttctgtgaagatattcttaatcttttccaactgggtttctctctatatattgtaataaaaatagctaccatgtagcacatgcttattatttgcctgtgcctaagcactgtataaccattgctcaatgtaatccttggatagatwctactactatccacattttacaaatgaggaatgtgatgctcaaaagatcttcttgcctcggcatagtgtctcgcgcctgtaatccgagcactttgggagaccgaggtgggcagatcacttgaggtcaggagttcgagaccagcctgaccaacatagtgaaaccccatctctactaaaaatacaaaaattaacctggtgtggtggcacatgcctgtgatctcagctactcgggaggctgaggcaggagaatcacttgaacccgggaggtggaggtttcagtgaaccgagatcatgccactgcactccagcctgggtgacaaagcaagactttgtctcaaaaaaaaaaaaaaaaaaaggacttctttaggtgacccagacaataaatgggggaacaaggatttgaacccagaactatctgactctacaccctaggccaagattgtatcacacattgttatgggctgaactatgtccccccatcctgccaagttcatatgttgaagtcccaattcccagtacgtcagaatgtaactgtatttggaaatgagatctttaaagaggtggttaaattaaaatgaggccattgggatggggcgctaatccaatgtgactggtgcccttacaagaagagggagagacaccaggggcatgtgtgtgcagagggatgaccacgtgaagaggcagcaagggatcagccatctgcaagccaagcagagtggcctgagatgaaatcaaccctgctggcatcttcatcttggacttccagacctcagaagtgtgagaaaagaagtttctgttgaagccacccagtcagtggtattttgttacggcagccctagcaaacaagcacaaacattttatgtccttctcactccatttaccataccatgacttcaaggactagactgtggtctcttgaatggaggaactaggtcttaattgtctttataacagccacagctcttagtagataacaggtatgcacaaatttgtttgagataattttttgcatgaaaattctgagttcagtaatgcttgagtagcttgcaagagttgatacaatcttaaagtgcctcccttgatgcaaattttaaaaaatatatagcttccctaccaaacagacggagactcatgtcattcatttactcattcagtgattcatttatttatcaaatatttgttaagcagttggtatgtgccattagacagtgaactaacaagcaaaatcgctcctcaaatacagcttacactctggtaaggaaagtcaggcaacagacaaatacctatataaaatgtcagttggtgataagtgccaggaatataaacaaagccagatgcaggatcttgcaggacgggaagggaatttaactttttagggtctttgtcagcacttctcatgctctgagattgaataggcactgatccaggcacaaatacagtgaaaaaaatatactttcctcaagtttatgggtagtagagaagaccaataggtatttatactacaacgtaaaaagttcaatcgtggaggaaacatatatcaggctatgggagcagagtgtctccaaaatatttagtgcactcacacggtaactccagcaagaagatgtcaccttagtttccattaatttttcaatccatattttattatttttatgtttctatccttttcttctggaatattatgaataattcattctcaacaatttaagtagtatactacaaaatttatggctctccatggatagtgtttcatgttataagagaaaatacctggcagcagccatgggcaggcaaattaagcattttgtaccaactgttgtgtcttctttctgggctgcatttgcctggtcactgggaattactctgggtctcacaggaccgataccagggaattcatggaacttattcctcagaaccctcaagaactatcatcctccatggacttcttaaatggggggcctcttttaggaggaaggatctctcaggctgacatgacattatctttcctagtcatggaagagaggaaagcagaacttgtaaaatggcaatttgagttctcccatttattccacaagtgagaggaaagtgaaggagaattttccaggtctttctcaaatatgtgagccaaaagcctcatagaaaggagaggactggagacttcagtcttagctttatgtcttcttaaagtattactgaaattttgtatgtttttcaaggaatcactctagtggaaattagattttgtttgtttgtttgtttatataagctgagtattgttctggtgttattaccctagagatgaacaacagggatggaggagaaaagagaatagagaaggaaggcttacacaaagtaggtaaaaatctgcaggcttcatctgctgtcagaaattcctccctctgttccctgtttgctttccctggctgtgggctcttaccttgaacattttccctgaatacactggtgtgctgaggaccctgaggacttgccacactcttgctgtctactggattaggctcagtatagatttgttcaatggccaatcactggatatcttaaaagagatctcaccatataagtgctgagcaaggtcagtggcctcctgaatcctttcttcttgctgcggcactgagggtgcaataaacttattaaactgctggtggagaattttcacagcttcctttgtcttgcactctgtggaatattttccaactcttacaactgtggcacttgcatcttcgtaccaaaaatgacactaaatttaaatgggataaagcacagatgaaagaaataccatccttctaaagttcttaattttgaccagtgaagtatcaaattttaattccctcaacttaatgttcacattggcttgaactttctaagtcataataaagaaaatattaaaacatgatcgtattctacagcacttaaatgttagcagcagaaataaatacaaatgtgaaaatatgtataaataaaactataagaaagtaaaaatatgaaaatatatttgattctcctaccttcttaggtttgcctaaaatataattcctaagaggaatgttgcagacttataagaacaggcaggataaaaagcatctggcactaaaaagaatccaaatacatgctaaatggcaagaaaaaagccaaatgttcacaatccagcataaagaattgatatcattaatcatacactgctaaagtattgcctgatgaatactctaataaataaattatctttgaagaataagatttagtttatgaatgggaaaatatcatctaacaaatagcatttcacctttgcttagtagaaaatggttatagtttccaaacacagtggagaatgagacagtttctcattaaaaataactgtggctgggcgtggtggctcacgcctgtaatcccagcactttgggaggccgaggcaggcggatcacgaggtcaggagatcgagaccatcctggctaacacggtgaaaccccatctctactaaaagtacaaaaaagtagccgggcgtggtggtgggcgcctgtagtcccagctactcgggaggctgaggcaggagaatggtgtgaacccgggaggcagagcttgcagtgagtcgagatcacgtcactgcactccagcctgggaaacagagcgacactccatctcaaaaataaataaataaataaataactgtgatggaaggaatgtctgactcaggcctgaagcacttatgcagggtgagaaatagaaacacatgactctgttagaagttggttttaaataagtgccacaaagggaccacaaacttatacatcatatgtagaagactgatcattttgattctccttaatctggtgttaaatctaaaaactcagctgcattagtggtaaagacgttctgtatctcaaacaataatgggcaacaaagaacactcaagaacttcaagtgcagaatttcttcaatacaaagtgttcaaacaataactttaacttgccaaatttcatatattttatgtatactctaccatttatcttcttgacagtaataaaagaaaacaccaataacaactttttgtagctgaaaaatcacagtatcactttttaaaataaatattttcaagttctgtgaaataaataaaccattctgagcattttaaacagatatccagcagtgaacataatttcatgataattaaacatcttcatctgatgaggttatggagaaacaggaactctcacacattgccagtaaattagtaaagacttttctcaagagaaattgaccaataaaatcaaagaccttataatattcatccccttaggtccagcaattctatttcagagaattatcctaaggaaaaaaaatcatgaaaaggagcatgwtacatgaatataatgagaataacagctaatgcaacattgctttaaagttgcaaaatgatttttgaaaacaacattacaacatggataccactgcaaaaagagaatacctct

SEQ ID NO: 6 - DNA, 1863 bp, Homo sapiens
atgtctccatccccgaccgccctcttctgtcttgggctgtgtctggggcgtgtgccagcgcagagtggaccgctccccaagccctccctccaggctctgcccagctccctggtgcccctggagaagccagtgaccctccggtgccagggacctccgggcgtggacctgtaccgcctggagaagctgagttccagcaggtaccaggatcaggcagtcctcttcatcccggccatgaagagaagtctggctggacgctaccgctgctcctaccagaacggaagcctctggtccctgcccagcgaccagctggagctcgttgccacgggagtttttgccaaaccctcgctctcagcccagcccggcccggcggtgtcgtcaggaggggacgtaaccctacagtgtcagactcggtatggctttgaccaatttgctctgtacaaggaaggggaccctgcgccctacaagaatcccgagagatggtacagggctagttttcccatcatcacggtgaccgccgcccacagcggaacctaccgatgctacagcttctccagcagggacccatacctgtggtcagcccccagcgaccccctggagcttgtggtcacaggaacctctgtgacccccagccggttaccaacagaaccaccttccccggtagcagaattctcagaagccaccgctgaactgaccgtctcattcacaaacgaagtcttcacaactgagacttctaggagtatcaccgccagtccaaaggagtcagactctccagctggtgagtcctgcccgccagtactacaccaagggcaacctggtccggatatgcctcggggctgtgatcctaataatcctggcggggtttctggcagaggactggcacagccggaggaagcgcctgcggcacaggggcagggctgtgcagaggccgcttccgcccctcccgcccctcccgctgacccggaaatcaaacgggggtcaggatggaggccgacaggatgttcacagccgcgggttatgttcatgaccgctgaaccccaggcacggtcgtatccaagggagggatcatggcatgggaggcgactcaaagactggcgtgtgtggagcgtggaagcaggagggcagaggctacagctgtggaaacgaggccatgctgcctcctcctggtgttccatcagggagccgttcggccagtgtctgtctgtctgtctgcctctctgtctgagggcaccctccatttgggatggaaggaatctgtggagaccccatcctcctccctgcacactgtggatgacatggtaccctggctggaccacatactggcctctttcttcaacctctctaatatgggctccagacggatctctaaggttcccagctctcagggttgactctgttccatcctctgtgcaaaatcctcccgtgcttccctttggccctctgtgctcttgtctggttttccccagaaactctcaccctcactccatctcccactgcggtctaacaaatctcctttcgtctctcagaacgggtcttgcaggcagtttgggtatgtcattcattttccttagtgtaaaactagcacgttgcccgcttcccttcacattagaaaacaagatcagcctgtgcaacatggtgaaacctcatctctaccaacaaaacaaaaaaacacaaaaattagccaggtgtggtggtgcatccctatactcccagcaactcagggggctgaggtgggagaatggcttgagcctgggaggcagaggttgcagtgagctgagatcacaccactgcactctagctcgggtgacgaagcctgactttgtctcaaaaaatacagggatgaatatgtcaattaccctgatttga

SEQ ID NO: 7 - DNA, 966 bp, Homo sapiens
atgtctccatccccgaccgccctcttctgtcttgggctgtgtctggggcgtgtgccagcgcagagtggaccgctccccaagccctccctccaggctctgcccagctccctggtgcccctggagaagccagtgaccctccggtgccagggacctccgggcgtggacctgtaccgcctggagaagctgagttccagcaggtaccaggatcaggcagtcctcttcatcccggccatgaagagaagtctggctggacgctaccgctgctcctaccagaacggaagcctctggtccctgcccagcgaccagctggagctcgttgccacgggagtttttgccaaaccctcgctctcagcccagcccggcccggcggtgtcgtcaggaggggacgtaaccctacagtgtcagactcggtatggctttgaccaatttgctctgtacaaggaaggggaccctgcgccctacaagaatcccgagagatggtacagggctagttttcccatcatcacggtgaccgccgcccacagcggaacctaccgatgctacagcttctccagcagggacccatacctgtggtcagcccccagcgaccccctggagcttgtggtcacagaattctcagaagccaccgctgaactgaccgtctcattcacaaacgaagtcttcacaactgagacttctaggagtatcaccgccagtccaaaggagtcagactctccagctggtcctgcccgccagtactacaccaagggcaacctggtccggatatgcctcggggctgtgatcctaataatcctggcggggtttctggcagaggactggcacagccggaggaagcgcctgcggcacaggggcagggctgtgcagaggccgcttccgcccctcccgcccctcccgctgacccggaaatcaaacgggggtcaggatggaggccgacaggatgttcacagccgcgggttatgttcatga

SEQ ID NO: 8 - DNA, 2263 bp, Homo sapiens
acagagctcaggacagggctgaggaaccatgtctccatccccgaccgccctcttctgtcttgggctgtgtctggggcgtgtgccagcgcagagtggaccgctccccaagccctccctccaggctctgcccagctccctggtgcccctggagaagccagtgaccctccggtgccagggacctccgggcgtggacctgtaccgcctggagaagctgagttccagcaggtaccaggatcaggcagtcctcttcatcccggccatgaagagaagtctggctggacgctaccgctgctcctaccagaacggaagcctctggtccctgcccagcgaccagctggagctcgttgccacgggagtttttgccaaaccctcgctctcagcccagcccggcccggcggtgtcgtcaggaggggacgtaaccctacagtgtcagactcggtatggctttgaccaatttgctctgtacaaggaaggggaccctgcgccctacaagaatcccgagagatggtaccgggctagtttccccatcatcacggtgaccgccgcccacagcggaacctaccgatgctacagcttctccagcagggacccatacctgtggtcggcccccagcgaccccctggagcttgtggtcacaggaacctctgtgacccccagccggttaccaacagaaccaccttcctcggtagcagaattctcagaagccaccgctgaactgaccgtctcattcacaaacaaagtcttcacaactgagacttctaggagtatcaccaccagtccaaaggagtcagactctccagctggtcctgcccgccagtactacaccaagggcaacctggtccggatatgcctcggggctgtgatcctaataatcctggcggggtttctggcagaggactggcacagccggaggaagcgcctgcggcacaggggcagggctgtgcagaggccgcttccgcccctcccgcccctcccgcagacccggaaatcacacgggggtcaggatggaggccgacaggatgttcacagccgcgggttatgttcatgaccgctgaaccccaggcacggtcgtatccaagggagggatcatggcatgggaggcgactcaaagactggcgtgtgtggagcgtggaagcaggagggcagaggctacagctgtggaaacgaggccatgctgcctcctcctggtgttccatcagggagccgttcggccagtgtctgtctgtctgtctgcctctctgtctgagggcaccctccatttgggatggaaggaatctgtggagaccccatcctcctccctgcacactgtggatgacatggtaccctggctggaccacatactggcctctttcttcaacctctctaatatgggctccagacggatctctaaggttcccagctctcagggttgactctgttccatcctctgtgcaaaatcctcctgtgcttccctttggccctctgtgctcttgtctggttttccccagaaactctcaccctcactccatctcccactgcggtctaacaaatctcctttcgtctctcagaacgggtcttgcaggcagtttgggtatgtcattcattttccttagtgtaaaactagcacgttgcccgcttcccttcacattagaaaacaagatcagcctgtgcaacatggtgaaacctcatctctaccaacaaaacaaaaaaacacaaaaattagccaggtgtggtggtgcatccctatactcccagcaactcggggggctgaggtgggagaatggcttgagcctgggaggcagaggttgcagtgagctgagatcacaccactgcactctagctcgggtgacgaagcctgaccttgtctcaaaaaatacagggatgaatatgtcaattaccctgatttgatcatagcacgttgtatacatgtactgcaatattgctgtccaccccataaatatgtacaattatgtatacatttttaaaatcataaaaataagataatgcaccgtctccacccctctcatatttactttctgaaggaaatgttaggtcttctcaaggtaaagttctatatttattatagcgtttaggcatttcttgaccatctaatgagtgtaaaactgtaccactgggccaagtgcagtggatcatgtctgtaatcctagcactgtgggaggccaaggcaggaggatcgcttgagcccaggagttcaagaccagcctgggcaacatagtgagaccccatctctacttaaaataaagaagtaaaaattgttttaaaa

SEQ ID NO: 9 - DNA, 6297 bp, Homo sapiens
agaaggtaaaaagggagtggtgagaatgaatgtgagaaggaagccaggacagcgcagtccccagtcccgaacggccagggagaggaggtggcctagcgctggcggggctcaccccaatccgtctgccttttgatgccgtactctgctggttgcgcagccacctcgggatactgcacacggagaggagggaaaataagcgaggcaccgccgcaccacgcgggagacctacggagacccacagcgcccgagccctggaagagcactactggatgtcagcggagaaatggctttgagctcagcctggcgctcggttctgcctctgtggctcctctggagcgctgcctgctcccgcgccgcgtccggggacgacaacgcttttccttttgacattgaagggagctcagcggttggcaggcaagacccgcctgagacgagcgaaccccgcgtggctctgggacgcctgccgcctgcggccgagaaatgcaatgctggattctttcacaccctgtcgggagaatgtgtgccctgcgactgtaatggcaattccaacgagtgtttggacggctcaggatactgtgtgcactgccagcggaacacaacaggagagcactgtgaaaagtgtctggatggttatatcggagattccatcaggggagcaccccaattctgccagccgtgcccctgtcccctgccccacttggccaattttgcagaatcctgctataggaaaaatggagctgttcggtgcatttgtaacgaaaattatgctggacctaactgtgaaagatgtgctcccggttactatggaaaccccttactcattggaagcacctgtaagaaatgtgactgcagtggaaattcagatcccaacctgatctttgaagattgtgatgaagtcactggccagtgtaggaattgcttacgcaacaccaccggattcaagtgtgaacgttgcgctcctggctactatggggacgccaggatagccaagaactgtgcagtgtgcaactgcgggggaggcccatgtgacagtgtaaccggagaatgcttggaagaaggttttgaaccccctacaggctgtgataagtgcgtctgggacctgactgatgacctgcggttagcagcgctctccatcgaggaaggcaaatccggggtgctgagcgtatcctctggggccgccgctcataggcacgtgaatgaaatcaacgccaccatctacctcctcaaaacaaaattgtcagaaagagaaaaccaatacgccctaagaaagatacaaatcaacaatgctgagaacacgatgaaaagccttctgtctgacgtagaggaattagttgaaaaggaaaatcaagcctccagaaaaggacaacttgttcagaaggaaagcatggacaccattaaccacgcaagtcagctggtagagcaagcccatgatatgagggataaaatccaagagatcaacaacaagatgctctattatggggaagagcatgaacttagccccaaggaaatctctgagaagctggtgttggcccagaagatgcttgaagagattagaagccgtcaaccatttttcacccaacgggagctcgtggatgaggaggcagatgaggcttacgaactactgagccaggctgagagctggcagcggctgcacaatgagacccgcactctgtttcctgtcgtcctggagcagctggatgactacaatgctaagttgtcagatctccaggaagcacttgaccaggcccttaaccatgtcagggatgccgaagacatgaacagggccacagcagccaggcagcgggaccatgagaaacaacaggaaagagtgagggaacaaatggaagtggtgaacatgtctctgagcacatctgcggactctctgacaacacctcgtctaactctttcagaacttgatgatataataaagaatgcgtcagggatttatgcagaaatagatggagccaaaagtgaactacaagtaaaactatctaacctaagtaacctcagccatgatttagtccaagaagctattgaccatgcacaggaccttcaacaagaagctaatgaattgagcaggaagttgcacagttcagatatgaacgggctggtacagaaggctttggatgcatcaaatgtctatgaaaatattgttaattatgttagtgaagccaatgaaacagcagaatttgctttgaacaccactgaccgaatttatgatgcggtgagtgggattgatactcaaatcatttaccataaagatgaaagtgagaacctcctcaatcaagccagagaactgcaagcaaaggcagagtctagcagtgatgaagcagtggctgacactagcaggcgtgtgggtggagccctagcaaggaaaagtgcccttaaaaccagactcagtgatgccgttaagcaactacaagcagcagagagaggggatgcccagcagcgcctggggcagtctagactgatcaccgaggaagccaacaggacgacgatggaggtgcagcaggccactgcccccatggccaacaatctaaccaactggtcacagaatcttcaacattttgactcttctgcttacaacactgcagtgaactctgctagggatgcagtaagaaatctgaccgaggttgtccctcagctcctggatcagcttcgtacggttgagcagaagcgacctgcaagcaacgtttctgccagcatccagaggatccgagagctcattgctcagaccagaagtgttgccagcaagatccaagtctccatgatgtttgatggccagtcagctgtggaagtgcactcgagaaccagtatggatgacttaaaggccttcacgtctctgagcctgtacatgaaaccccctgtgaagcggccggaactgaccgagactgcagatcagtttatcctgtacctcggaagcaaaaacgccaaaaaagagtatatgggtcttgcaatcaaaaatgataatctggtatacgtctataatttgggaactaaagatgtggagattcccctggactccaagcccgtcagttcctggcctgcttacttcagcattgtcaagattgaaagggtgggaaaacatggaaaggtgtttttaacagtcccgagtctaagtagcacagcagaggaaaagttcattaaaaagggggaattttcgggagatgactctctgctggacctggaccctgaggacacagtgttttatgttggtggagtgccttccaacttcaagctccctaccagcttaaacctgcctggctttgttggctgcctggaactggccactttgaataatgatgtgatcagcttgtacaactttaagcacatctataatatggacccctccacatcagtgccatgtgcccgagataagctggccttcactcagagtcgggctgccagttacttcttcgatggctccggttatgccgtggtgagagacatcacaaggagagggaaatttggtcaggtgactcgctttgacatagaagttcgaacaccagctgacaacggccttattctcctgatggtcaatggaagtatgtttttcagactggaaatgcgcaatggttacctacatgtgttctatgattttggattcagcagtggccgtgtgcatcttgaagatacgttaaagaaagctcaaattaatgatgcaaaataccatgagatctcaatcatttaccacaatgataagaaaatgatcttggtagttgacagaaggcatgtcaagagcatggataatgaaaagatgaaaataccttttacagatatatacattggaggagctcctccagaaatcttacaatccagggccctcagagcacaccttcccctagatatcaacttcagaggatgcatgaagggcttccagttccaaaagaaggacttcaatttactggagcagacagaaaccctgggagttggttatggatgcccagaagactcacttatatctcgcagagcatatttcaatggacagagcttcattgcttcaattcagaaaatatctttctttgatggctttgaaggaggttttaatttccgaacattacaaccaaatgggttactattctattatgcttcagggtcagacgtgttctccatctcactggataatggtactgtcatcatggatgtaaagggaatcaaagttcagtcagtagataagcagtacaatgatgggctgtcccacttcgtcattagctctgtctcacccacaagatatgaactgatagtagataaaagcagagttgggagtaagaatcctaccaaagggaaaatagaacagacacaagcaagtgaaaagaagttttacttcggtggctcaccaatcagtgctcagtatgctaatttcactggctgcataagtaatgcctactttaccagggtggatagagatgtggaggttgaagatttccaacggtatactgaaaaggtccacacttctctttatgagtgtcccattgagtcttcaccattgtttctcctccataaaaaaggaaaaaatttatccaagcctaaagcaagtcagaataaaaagggagggaaaagtaaagatgcaccttcatgggatcctgttgctctgaaactcccagagcggaatactccaagaaactctcattgccacctttccaacagccctagagcaatagagcacgcctatcaatatggaggaacagccaacagccgccaagagtttgaacacttaaaaggagattttggtgccaaatctcagttttccattcgtctgagaactcgttcctcccatggcatgatcttctatgtctcagatcaagaagagaatgacttcatgactctatttttggcccatggccgcttggtttacatgtttaatgttggtcacaaaaaactgaagattagaagccaggagaaatacaatgatggcctgtggcatgatgtgatatttattcgagaaaggagcagtggccgactggtaattgatggtctccgagtcctagaagaaagtcttcctcctactgaagctacctggaaaatcaagggtcccatttatttgggaggtgtggctcctggaaaggctgtgaaaaatgttcagattaactccatctacagttttagtggctgtctcagcaatctccagctcaatggggcctccatcacctctgcttctcagacattcagtgtgaccccttgctttgaaggccccatggaaacaggaacttacttttcaacagaaggaggatacgtggttctagatgaatctttcaatattggattgaagtttgaaattgcatttgaagtccgtcccagaagcagttccggaaccctggtccacggccacagtgtcaatggggagtacctaaatgttcacatgaaaaatggacaggtcatagtgaaagtcaataatggcatcagagatttttccacctcagtaacacccaagcagagtctctgtgatggcagatggcacagaattacagttattagagattctaatgtggttcagttggatgtggactctgaagtgaaccatgtggttggacccctgaatccaaaaccaattgatcacagggagcctgtgtttgttggaggtgttccagaatctctactgacaccacgcttggcccccagcaaacccttcacaggctgcatacgccactttgtgattgatggacacccagtgagcttcagtaaagcagccctggtcagcggcgccgtaagcatcaactcctgtccagcagcctgacatgacagagcacagctgcccaaatacaaagttctttagagcactgaaagaaacacaaagccagccaggaggaacagtaactcttccttcgggtggaagctttcatcgagttgaacaggacttaaacgaatcatcagggaccggatatttcttatttctcatttggattcttaaccttgaatccaaagtgtctgcaatggacaacaattgaaggagaggcaaacttacttgtattgagagcacacgcaattcctactggtgaaattactgtttctgtttctaataaaatagaagggattccaaataaacacttgcacacatttttgaagtgcggctagattctcagattcacctttcttccagggaagataactttcaatctatataaaaatctctgtcctaaaactacctttctttattttgaagagacttactaacttacatataatctaaattagatgatagatttctttttagcccttttgtttggtctatcagtataagaagaatattttaggtttatagctgaagttatcaaggtttaataaagtaaatttctaaca

SEQ ID NO: 10 - DNA, 2454 bp, Homo sapiens
ccaggaggcacgctggttttccggggccgctccatcgcgccttcctcctgcgcctcgcttctccggtccagccgccatcttcctttccgcacaggggccgccgagcggggccatgcagccaacgctgcttctcagcctcctgggagccgtggggctggcggctgtcaattccatgccagtggataacaggaaccacaatgaaggaatggtgactcgctgcatcattgaggtcctctcaaatgccttgtcgaagtccagcgctccacccatcacccctgagtgccgccaagtcctgaagacgagtagaaaagacgtcaaagacaaagagacaactgaaaatgaaaacacaaagtttgaagtaagattgttaagagacccagctgatgcctcggaagcccacgagtcctccagcaggggagaggcaggagccccaggggaggaggacatccaaggcccaacaaaggcagacacagagaaatgggcagagggaggcgggcacagccgagagcgagcggatgagccccagtggagcctctatccctccgacagccaagtctctgaagaagtgaagacacgccattctgagaagagccagagagaggatgaggaggaggaggagggagagaactatcaaaaaggggagcgaggggaagatagcagtgaagagaaacaccttgaagagccaggagagacacaaaacgcttttctcaatgaaagaaagcaggcttcagctataaaaaaagaggagttagtggccagatcggaaacacatgctgccgggcattctcaggagaagacacatagccgagagaagagtagccaggagagtggagaggaggcagggagccaggagaatcacccccaggagtctaaaggccaaccccgaagccaggaagaatctgaggaaggtgaggaagatgccacctctgaggtggacaaacgacgcacgaggcccagacaccaccacgggaggagcaggcccgacaggtcctctcaaggagggagtcttccctctgaggaaaagggacacccccaggaggaatctgaggagtcaaacgtcagcatggccagtttaggggaaaagagggaccaccattcaacccactacagggcttcagaggaagaacctgaatatggagaagaaataaagggttatccaggcgtccaggcccctgaggacctggagtgggagcgctataggggcagaggaagtgaagaatacagggctccaagacctcagagtgaggagagttgggatgaggaggacaagagaaactaccccagcttagagcttgataagatggcacatggatatggtgaagaaagtgaggaagagaggggccttgagccgggaaagggacgccatcacagaggcaggggaggggagccacgtgcctatttcatgtctgacaccagagaagagaaaaggttcttgggtgaaggacaccaccgtgtccaagaaaaccagatggacaaggcaaggaggcatccacaaggtgcgtggaaagagctggacagaaattatctcaactacggtgaggaaggagccccagggaagtggcagcagcagggagacctgcaggacactaaagaaaacagggaggaagctaggtttcaagataaacaatatagctcccatcacacagctgaaaagaggaagagattaggggaactgttcaacccatactacgaccctctccagtggaagagcagccattttgaaagaagagacaacatgaatgacaattttctcgagggtgaggaggaaaatgagctgaccttgaacgagaagaatttcttcccagaatacaactatgactggtgggagaaaaagcccttctctgaggatgtgaactgggggtatgagaagagaaacctcgccagggtccccaagctggacctgaaaaggcaatatgacagggtggcccaactggaccagctccttcactacaggaagaagtcagctgagtttccagacttctatgattctgaggagccggtgagcacccaccaggaggcagaaaatgaaaaggacagggctgaccagacagtcctgacagaggacgagaaaaaagaactcgaaaacttggctgcaatggatttggaactacagaagatagctgagaaattcagccaaaggggctgactgtcattggagcggtgggcactgttaagaagcagccatcacatgatctgtttttcaccacttcactgaaagacaccatttatatacccaagggcagaaagtagaacttactattcattaaatgtttgacacaattggaattgtctttaatttctgtcagaatgctattgaaaatgtgaattgcatgacttgtagcatattcttttctgcaaaatagacatattaacatgcttatgacaatgactgtgctactgtctttggaaaaatgtttgtctcagttggaaataataaaagattcacctgagacc

SEQ ID NO: 11 - DNA, 512 bp, Homo sapiens
ttcagacctgtagatgggctcttcttggacattctggagtccctgggggaaagggaagtctgaagctcagttggccacctctgcataacaaataccgagagcactgcaagtggagcttggacaaggtctggaaaatcagccttcttctggatgcctccagcctttgctatcatctgcctaggaggttggaagttactcaagcggctcaaggaaaagtccctatttctgttgcagttgatttggagttatgtgatgtgtagcccatcagaagtaagcagaaaactttgtgccgttttctatcctggaaataacacccccgccccctggccccgctgcattatcagccactcctcttcactcctttctatggctccagaagtgaagagctctgaaatgcctaaattgccagatgggaacatctttactgcttggagaaagccacacaggagttacctgacctgccttggatggtgacatgagtgagaaataaacctttgttgggttagactgct

SEQ ID NO: 12 - protein, 620 aa, Homo sapiens
MSPSPTALFCLGLCLGRVPAQSGPLPKPSLQALPSSLVPLEKPVTLRCQGPPGVDLYRLEKLSSSRYQDQAVLFIPAMKRSLAGRYRCSYQNGSLWSLPSDQLELVATGVFAKPSLSAQPGPAVSSGGDVTLQCQTRYGFDQFALYKEGDPAPYKNPERWYRASFPIITVTAAHSGTYRCYSFSSRDPYLWSAPSDPLELVVTGTSVTPSRLPTEPPSPVAEFSEATAELTVSFTNEVFTTETSRSITASPKESDSPAGESCPPVLHQGQPGPDMPRGCDPNNPGGVSGRGLAQPEEAPAAQGQGCAEAASAPPAPPADPEIKRGSGWRPTGCSQPRVMFMTAEPQARSYPREGSWHGRRLKDWRVWSVEAGGQRLQLWKRGHAASSWCSIREPFGQCLSVCLPLCLRAPSIWDGRNLWRPHPPPCTLWMTWYPGWTTYWPLSSTSLIWAPDGSLRFPALRVDSVPSSVQNPPVLPFGPLCSCLVFPRNSHPHSISHCGLTNLLSSLRTGLAGSLGMSFIFLSVKLARCPLPFTLENKISLCNMVKPHLYQQNKKTQKLARCGGASLYSQQLRGLRWENGLSLGGRGCSELRSHHCTLARVTKPDFVSKNTGMNMSITLI

SEQ ID NO: 13 - protein, 321 aa, Homo sapiens
MSPSPTALFCLGLCLGRVPAQSGPLPKPSLQALPSSLVPLEKPVTLRCQGPPGVDLYRLEKLSSSRYQDQAVLFIPAMKRSLAGRYRCSYQNGSLWSLPSDQLELVATGVFAKPSLSAQPGPAVSSGGDVTLQCQTRYGFDQFALYKEGDPAPYKNPERWYRASFPIITVTAAHSGTYRCYSFSSRDPYLWSAPSDPLELVVTEFSEATAELTVSFTNEVFTTETSRSITASPKESDSPAGPARQYYTKGNLVRICLGAVILIILAGFLAEDWHSRRKRLRHRGRAVQRPLPPLPPLPLTRKSNGGQDGGRQDVHSRGLCS

SEQ ID NO: 14 - protein, 339 aa, Homo sapiens
MSPSPTALFCLGLCLGRVPAQSGPLPKPSLQALPSSLVPLEKPVTLRCQGPPGVDLYRLEKLSSSRYQDQAVLFIPAMKRSLAGRYRCSYQNGSLWSLPSDQLELVATGVFAKPSLSAQPGPAVSSGGDVTLQCQTRYGFDQFALYKEGDPAPYKNPERWYRASFPIITVTAAHSGTYRCYSFSSRDPYLWSAPSDPLELVVTGTSVTPSRLPTEPPSSVAEFSEATAELTVSFTNKVFTTETSRSITTSPKESDSPAGPARQYYTKGNLVRICLGAVILIILAGFLAEDWHSRRKRLRHRGRAVQRPLPPLPPLPQTRKSHGGQDGGRQDVHSRGLCS

SEQ ID NO: 15 - protein, 1816 aa, Homo sapiens
MALSSAWRSVLPLWLLWSAACSRAASGDDNAFPFDIEGSSAVGRQDPPETSEPRVALGRLPPAAEKCNAGFFHTLSGECVPCDCNGNSNECLDGSGYCVHCQRNTTGEHCEKCLDGYIGDSIRGAPQFCQPCPCPLPHLANFAESCYRKNGAVRCICNENYAGPNCERCAPGYYGNPLLIGSTCKKCDCSGNSDPNLIFEDCDEVTGQCRNCLRNTTGFKCERCAPGYYGDARIAKNCAVCNCGGGPCDSVTGECLEEGFEPPTGCDKCVWDLTDDLRLAALSIEEGKSGVLSVSSGAAAHRHVNEINATIYLLKTKLSERENQYALRKIQINNAENTMKSLLSDVEELVEKENQASRKGQLVQKESMDTINHASQLVEQAHDMRDKIQEINNKMLYYGEEHELSPKEISEKLVLAQKMLEEIRSRQPFFTQRELVDEEADEAYELLSQAESWQRLHNETRTLFPVVLEQLDDYNAKLSDLQEALDQALNHVRDAEDMNRATAARQRDHEKQQERVREQMEVVNMSLSTSADSLTTPRLTLSELDDIIKNASGIYAEIDGAKSELQVKLSNLSNLSHDLVQEAIDHAQDLQQEANELSRKLHSSDMNGLVQKALDASNVYENIVNYVSEANETAEFALNTTDRIYDAVSGIDTQIIYHKDESENLLNQARELQAKAESSSDEAVADTSRRVGGALARKSALKTRLSDAVKQLQAAERGDAQQRLGQSRLITEEANRTTMEVQQATAPMANNLTNWSQNLQHFDSSAYNTAVNSARDAVRNLTEVVPQLLDQLRTVEQKRPASNVSASIQRIRELIAQTRSVASKIQVSMMFDGQSAVEVHSRTSMDDLKAFTSLSLYMKPPVKRPELTETADQFILYLGSKNAKKEYMGLAIKNDNLVYVYNLGTKDVEIPLDSKPVSSWPAYFSIVKIERVGKHGKVFLTVPSLSSTAEEKFIKKGEFSGDDSLLDLDPEDTVFYVGGVPSNFKLPTSLNLPGFVGCLELATLNNDVISLYNFKHIYNMDPSTSVPCARDKLAFTQSRAASYFFDGSGYAVVRDITRRGKFGQVTRFDIEVRTPADNGLILLMVNGSMFFRLEMRNGYLHVFYDFGFSSGRVHLEDTLKKAQINDAKYHEISIIYHNDKKMILVVDRRHVKSMDNEKMKIPFTDIYIGGAPPEILQSRALRAHLPLDINFRGCMKGFQFQKKDFNLLEQTETLGVGYGCPEDSLISRRAYFNGQSFIASIQKISFFDGFEGGFNFRTLQPNGLLFYYASGSDVFSISLDNGTVIMDVKGIKVQSVDKQYNDGLSHFVISSVSPTRYELIVDKSRVGSKNPTKGKIEQTQASEKKFYFGGSPISAQYANFTGCISNAYFTRVDRDVEVEDFQRYTEKVHTSLYECPIESSPLFLLHKKGKNLSKPKASQNKKGGKSKDAPSWDPVALKLPERNTPRNSHCHLSNSPRAIEHAYQYGGTANSRQEFEHLKGDFGAKSQFSIRLRTRSSHGMIFYVSDQEENDFMTLFLAHGRLVYMFNVGHKKLKIRSQEKYNDGLWHDVIFIRERSSGRLVIDGLRVLEESLPPTEATWKIKGPIYLGGVAPGKAVKNVQINSIYSFSGCLSNLQLNGASITSASQTFSVTPCFEGPMETGTYFSTEGGYVVLDESFNIGLKFEIAFEVRPRSSSGTLVHGHSVNGEYLNVHMKNGQVIVKVNNGIRDFSTSVTPKQSLCDGRWHRITVIRDSNVVQLDVDSEVNHVVGPLNPKPIDHREPVFVGGVPESLLTPRLAPSKPFTGCIRHFVIDGHPVSFSKAALVSGAVSINSCPAA

SEQ ID NO: 16 - protein, 677 aa, Homo sapiens
MQPTLLLSLLGAVGLAAVNSMPVDNRNHNEGMVTRCIIEVLSNALSKSSAPPITPECRQVLKTSRKDVKDKETTENENTKFEVRLLRDPADASEAHESSSRGEAGAPGEEDIQGPTKADTEKWAEGGGHSRERADEPQWSLYPSDSQVSEEVKTRHSEKSQREDEEEEEGENYQKGERGEDSSEEKHLEEPGETQNAFLNERKQASAIKKEELVARSETHAAGHSQEKTHSREKSSQESGEEAGSQENHPQESKGQPRSQEESEEGEEDATSEVDKRRTRPRHHHGRSRPDRSSQGGSLPSEEKGHPQEESEESNVSMASLGEKRDHHSTHYRASEEEPEYGEEIKGYPGVQAPEDLEWERYRGRGSEEYRAPRPQSEESWDEEDKRNYPSLELDKMAHGYGEESEEERGLEPGKGRHHRGRGGEPRAYFMSDTREEKRFLGEGHHRVQENQMDKARRHPQGAWKELDRNYLNYGEEGAPGKWQQQGDLQDTKENREEARFQDKQYSSHHTAEKRKRLGELFNPYYDPLQWKSSHFERRDNMNDNFLEGEEENELTLNEKNFFPEYNYDWWEKKPFSEDVNWGYEKRNLARVPKLDLKRQYDRVAQLDQLLHYRKKSAEFPDFYDSEEPVSTHQEAENEKDRADQTVLTEDEKKELENLAAMDLELQKIAEKFSQRG

SEQ ID NO: 17 - protein, 107 aa, Homo sapiens
MPPAFAIICLGGWKLLKRLKEKSLFLLQLIWSYVMCSPSEVSRKLCAVFYPGNNTPAPWPRCIISHSSSLLSMAPEVKSSEMPKLPDGNIFTAWRKPHRSYLTCLGW

SEQ ID NO: 18 - DNA, 23 bp, Artificial Sequence
  Description of Artificial Sequence: Synthetic oligonucleotide
  modified_base (3)..(21): a, c, g, t, unknown or other
aannnnnnnnnnnnnnnnnnntt

SEQ ID NO: 19 - DNA, 31 bp, Artificial Sequence
  Description of Artificial Sequence: Synthetic primer
acgttggatgagggctgtgcagaggccgctt

SEQ ID NO: 20 - DNA, 20 bp, Artificial Sequence
  Description of Artificial Sequence: Synthetic primer
cagctggatgactacaatgc

SEQ ID NO: 21 - DNA, 20 bp, Artificial Sequence
  Description of Artificial Sequence: Synthetic primer
cagcttttgaggcactttcc

SEQ ID NO: 22 - DNA, 20 bp, Artificial Sequence
  Description of Artificial Sequence: Synthetic primer
taactcctgtgtggctttct

SEQ ID NO: 23 - DNA, 20 bp, Artificial Sequence
  Description of Artificial Sequence: Synthetic primer
catgaagccttatgcttgag

SEQ ID NO: 24 - DNA, 30 bp, Artificial Sequence
  Description of Artificial Sequence: Synthetic primer
acgttggatgtgaacatcctgtcggcctcc

SEQ ID NO: 25 - DNA, 20 bp, Artificial Sequence
  Description of Artificial Sequence: Synthetic primer
tgttcatgtcttcggcatcc

SEQ ID NO: 26 - DNA, 20 bp, Artificial Sequence
  Description of Artificial Sequence: Synthetic primer
agcaccttgcatacccatag

SEQ ID NO: 27 - DNA, 20 bp, Artificial Sequence
  Description of Artificial Sequence: Synthetic primer
gtgaagagctctgaaatgcc

SEQ ID NO: 28 - DNA, 20 bp, Artificial Sequence
  Description of Artificial Sequence: Synthetic primer
gttcccttcccccataaaac

SEQ ID NO: 29 - DNA, 18 bp, Artificial Sequence
  Description of Artificial Sequence: Synthetic primer
ctccatcctgacccccgt

SEQ ID NO: 30 - DNA, 20 bp, Artificial Sequence
  Description of Artificial Sequence: Synthetic primer
cacttgaccaggcccttaac

SEQ ID NO: 31 - DNA, 21 bp, Artificial Sequence
  Description of Artificial Sequence: Synthetic primer
gatccttctcacttactgttc

SEQ ID NO: 32 - DNA, 21 bp, Artificial Sequence
  Description of Artificial Sequence: Synthetic primer
ctccaagcagtaaagatgttc

SEQ ID NO: 33 - DNA, 20 bp, Artificial Sequence
  Description of Artificial Sequence: Synthetic primer
ctgtcatgattgacaggtcc

SEQ ID NO: 34 - DNA, 28 bp, Artificial Sequence
  Description of Artificial Sequence: Synthetic primer
acgttggatgagatggcccctctcccct

SEQ ID NO: 35 - DNA, 30 bp, Artificial Sequence
  Description of Artificial Sequence: Synthetic primer
acgttggatgggttgaggagtattccattg

SEQ ID NO: 36 - DNA, 30 bp, Artificial Sequence
  Description of Artificial Sequence: Synthetic primer
acgttggatgagtttcttgtctcctgggtg

SEQ ID NO: 37 - DNA, 30 bp, Artificial Sequence
  Description of Artificial Sequence: Synthetic primer
acgttggatgggctgctcaggttctaaaag

SEQ ID NO: 38 - DNA, 30 bp, Artificial Sequence
  Description of Artificial Sequence: Synthetic primer
acgttggatgggtgacaaagtgagactccg

SEQ ID NO: 39 - DNA, 30 bp, Artificial Sequence
  Description of Artificial Sequence: Synthetic primer
acgttggatgaggagagcctgcaggttgaa

SEQ ID NO: 40 - DNA, 30 bp, Artificial Sequence
  Description of Artificial Sequence: Synthetic primer
acgttggatgagatgcaccgaatggatctg

SEQ ID NO: 41 - DNA, 30 bp, Artificial Sequence
  Description of Artificial Sequence: Synthetic primer
acgttggatgaagctgagattgtgctgctg

SEQ ID NO: 42 - DNA, 30 bp, Artificial Sequence
  Description of Artificial Sequence: Synthetic primer
acgttggatgaactcctgaccacgtgatcc

SEQ ID NO: 43 - DNA, 30 bp, Artificial Sequence
  Description of Artificial Sequence: Synthetic primer
acgttggatgaaaagtagctgagcgtggtg

SEQ ID NO: 44 - DNA, 30 bp, Artificial Sequence
  Description of Artificial Sequence: Synthetic primer
acgttggatggctgtgatgacaatcaaggg

SEQ ID NO: 45 - DNA, 30 bp, Artificial Sequence
  Description of Artificial Sequence: Synthetic primer
acgttggatgaaacttacgaaggtctgggc

SEQ ID NO: 46 - DNA, 30 bp, Artificial Sequence
  Description of Artificial Sequence: Synthetic primer
acgttggatggaaaggaacaagtgatccag

SEQ ID NO: 47 - DNA, 30 bp, Artificial Sequence
  Description of Artificial Sequence: Synthetic primer
acgttggatggtggaacaaacagttggagc

SEQ ID NO: 48 - DNA, 30 bp, Artificial Sequence
  Description of Artificial Sequence: Synthetic primer
acgttggatgttttctcatccgccagcagg

SEQ ID NO: 49 - DNA, 30 bp, Artificial Sequence
  Description of Artificial Sequence: Synthetic primer
acgttggatgaaaagtagagcatgtggacc

SEQ ID NO: 50 - DNA, 30 bp, Artificial Sequence
  Description of Artificial Sequence: Synthetic primer
acgttggatgaggcaggaggactgattgag

SEQ ID NO: 51 - DNA, 30 bp, Artificial Sequence
  Description of Artificial Sequence: Synthetic primer
acgttggatgtctgcaacgttcgttcttcc

SEQ ID NO: 52 - DNA, 30 bp, Artificial Sequence
  Description of Artificial Sequence: Synthetic primer
acgttggatgtgtgcccggccctttttttc

SEQ ID NO: 53 - DNA, 30 bp, Artificial Sequence
  Description of Artificial Sequence: Synthetic primer
acgttggatgaatcctagctactcaggagg

SEQ ID NO: 54 - DNA, 30 bp, Artificial Sequence
  Description of Artificial Sequence: Synthetic primer
acgttggatgattggttacactgggactgc

SEQ ID NO: 55 - DNA, 30 bp, Artificial Sequence
  Description of Artificial Sequence: Synthetic primer
acgttggatgccctacaagaatcccgagag

SEQ ID NO: 56 - DNA, 31 bp, Artificial Sequence
  Description of Artificial Sequence: Synthetic primer
acgttggatgaagctgtagcatcggtaggtt

SEQ ID NO: 57 - DNA, 30 bp, Artificial Sequence
  Description of Artificial Sequence: Synthetic primer
acgttggatgaagatggaggaccacaggtg

SEQ ID NO: 58 - DNA, 30 bp, Artificial Sequence
  Description of Artificial Sequence: Synthetic primer
acgttggatgaacagtactaagggcagatg

SEQ ID NO: 59 - DNA, 30 bp, Artificial Sequence
  Description of Artificial Sequence: Synthetic primer
acgttggatgccaaagaaactcccagaatc

SEQ ID NO: 60 - DNA, 30 bp, Artificial Sequence
  Description of Artificial Sequence: Synthetic primer
acgttggatgtgaagtcatgagaagaaggc

SEQ ID NO: 61 - DNA, 30 bp, Artificial Sequence
  Description of Artificial Sequence: Synthetic primer
acgttggatgttcatgatctgaatcccccc

SEQ ID NO: 62 - DNA, 30 bp, Artificial Sequence
  Description of Artificial Sequence: Synthetic primer
acgttggatgtctagcccagcaatgaactc

SEQ ID NO: 63 - DNA, 31 bp, Artificial Sequence
  Description of Artificial Sequence: Synthetic primer
acgttggatgctcaatatacccgtgatacag

SEQ ID NO: 64 - DNA, 30 bp, Artificial Sequence
  Description of Artificial Sequence: Synthetic primer
acgttggatgagtgtcaccctgatttccag

SEQ ID NO: 65 - DNA, 30 bp, Artificial Sequence
  Description of Artificial Sequence: Synthetic primer
acgttggatgctcagctccttggtgaagag

SEQ ID NO: 66 - DNA, 31 bp, Artificial Sequence
  Description of Artificial Sequence: Synthetic primer
acgttggatggagttccctcagtttttattg

SEQ ID NO: 67 - DNA, 30 bp, Artificial Sequence
  Description of Artificial Sequence: Synthetic primer
acgttggatgatctgctgacctcgtgatcc

SEQ ID NO: 68 - DNA, 30 bp, Artificial Sequence
  Description of Artificial Sequence: Synthetic primer
acgttggatgatggaccctgcagaacctac

SEQ ID NO: 69 - DNA, 30 bp, Artificial Sequence
  Description of Artificial Sequence: Synthetic primer
acgttggatgtcaagcgattctcctgcctc

SEQ ID NO: 70 - DNA, 30 bp, Artificial Sequence
  Description of Artificial Sequence: Synthetic primer
acgttggatggtaatcccagctacttggag

SEQ ID NO: 71 - DNA, 30 bp, Artificial Sequence
  Description of Artificial Sequence: Synthetic primer
acgttggatgtattaaatgcacctggcacc

SEQ ID NO: 72 - DNA, 30 bp, Artificial Sequence
  Description of Artificial Sequence: Synthetic primer
acgttggatgcttctatttcttccagcagc

SEQ ID NO: 73 - DNA, 31 bp, Artificial Sequence
  Description of Artificial Sequence: Synthetic primer
acgttggatggtgaaaccttgtctcatatac

SEQ ID NO: 74 - DNA, 30 bp, Artificial Sequence
  Description of Artificial Sequence: Synthetic primer
acgttggatgactgtgcctaggctatactg

SEQ ID NO: 75 - DNA, 30 bp, Artificial Sequence
  Description of Artificial Sequence: Synthetic primer
acgttggatgtggaacttcttggtgccatc

SEQ ID NO: 76 - DNA, 30 bp, Artificial Sequence
  Description of Artificial Sequence: Synthetic primer
acgttggatgattagccaggtgtggtggtg

SEQ ID NO: 77 - DNA, 31 bp, Artificial Sequence; identical to SEQ ID NO: 19
  Description of Artificial Sequence: Synthetic primer

SEQ ID NO: 78 - DNA, 30 bp, Artificial Sequence
  Description of Artificial Sequence: Synthetic primer
acgttggatgccaagaaagtccttggtgtg

SEQ ID NO: 79 - DNA, 30 bp, Artificial Sequence
  Description of Artificial Sequence: Synthetic primer
acgttggatgtctgctgagcatgaaatgcc

SEQ ID NO: 80 - DNA, 30 bp, Artificial Sequence
  Description of Artificial Sequence: Synthetic primer
acgttggatgtatcatacgctaggctggag

SEQ ID NO: 81 - DNA, 30 bp, Artificial Sequence
  Description of Artificial Sequence: Synthetic primer
acgttggatgccaaccaaccaacaaacctg

SEQ ID NO: 82 - DNA, 30 bp, Artificial Sequence
  Description of Artificial Sequence: Synthetic primer
acgttggatgaggacacaggaatccagaag

SEQ ID NO: 83 - DNA, 30 bp, Artificial Sequence
  Description of Artificial Sequence: Synthetic primer
acgttggatgtaggtgggaaggaagtggga

SEQ ID NO: 84 - DNA, 30 bp, Artificial Sequence
  Description of Artificial Sequence: Synthetic primer
acgttggatgtacctgtgaccacaagctcc

SEQ ID NO: 85 - DNA, 30 bp, Artificial Sequence
  Description of Artificial Sequence: Synthetic primer
acgttggatgaatcaactaggcatggtggc

SEQ ID NO: 86 - DNA, 30 bp, Artificial Sequence
  Description of Artificial Sequence: Synthetic primer
acgttggatgccccatatacatgtgcgatg

SEQ ID NO: 87 - DNA, 30 bp, Artificial Sequence
  Description of Artificial Sequence: Synthetic primer
acgttggatgagtagctgggattacaggcg

SEQ ID NO: 88 - DNA, 30 bp, Artificial Sequence
  Description of Artificial Sequence: Synthetic primer
acgttggatgaggagaatggtgtgaagctg

SEQ ID NO: 89 - DNA, 30 bp, Artificial Sequence
  Description of Artificial Sequence: Synthetic primer
acgttggatgggatggtcccagttttacat

SEQ ID NO: 90 - DNA, 30 bp, Artificial Sequence
  Description of Artificial Sequence: Synthetic primer
acgttggatgaaaaggaagggcattctggc

SEQ ID NO: 91 - DNA, 30 bp, Artificial Sequence
  Description of Artificial Sequence: Synthetic primer
acgttggatgatccctgggaagacggtcat

SEQ ID NO: 92 - DNA, 30 bp, Artificial Sequence
  Description of Artificial Sequence: Synthetic primer
acgttggatgtgctcactgcatgagattcc

SEQ ID NO: 93 - DNA, 30 bp, Artificial Sequence
  Description of Artificial Sequence: Synthetic primer
acgttggatgagtccagcctggcaaacatg

SEQ ID NO: 94 - DNA, 30 bp, Artificial Sequence
  Description of Artificial Sequence: Synthetic primer
acgttggatgtttaaaatgcccgctgcacg

SEQ ID NO: 95 - DNA, 30 bp, Artificial Sequence
  Description of Artificial Sequence: Synthetic primer
acgttggatgctgtacgcattaccacagac

SEQ ID NO: 96 - DNA, 29 bp, Artificial Sequence
  Description of Artificial Sequence: Synthetic primer
acgttggatgcaggagcttgggtacccac

SEQ ID NO: 97 - DNA, 30 bp, Artificial Sequence
  Description of Artificial Sequence: Synthetic primer
acgttggatgttgtaccactgcactctagc

SEQ ID NO: 98 - DNA, 29 bp, Artificial Sequence
  Description of Artificial Sequence: Synthetic primer
acgttggatgcagacgtccgtgcttcacc

SEQ ID NO: 99 - DNA, 30 bp, Artificial Sequence
  Description of Artificial Sequence: Synthetic primer
acgttggatgatgaccattgctcgtctgtg

SEQ ID NO: 100 - DNA, 30 bp, Artificial Sequence
  Description of Artificial Sequence: Synthetic primer
acgttggatgaatcacaaatggcaacacgg

SEQ ID NO: 101 - DNA, 30 bp, Artificial Sequence
  Description of Artificial Sequence: Synthetic primer
acgttggatgaccccatgctgtgttttctc

SEQ ID NO: 102 - DNA, 30 bp, Artificial Sequence
  Description of Artificial Sequence: Synthetic primer
acgttggatgcttcccacacccactatatc

SEQ ID NO: 103 - DNA, 30 bp, Artificial Sequence
  Description of Artificial Sequence: Synthetic primer
acgttggatgcactacctctctagcaactg

SEQ ID NO: 104 - DNA, 30 bp, Artificial Sequence
  Description of Artificial Sequence: Synthetic primer
acgttggatgtccttggcttgtggcccttc

SEQ ID NO: 105 - DNA, 30 bp, Artificial Sequence
  Description of Artificial Sequence: Synthetic primer
acgttggatgccaccccatgattccatttc

SEQ ID NO: 106 - DNA, 30 bp, Artificial Sequence
  Description of Artificial Sequence: Synthetic primer
acgttggatgccctgtctctctaaaaccac

SEQ ID NO: 107 - DNA, 30 bp, Artificial Sequence
  Description of Artificial Sequence: Synthetic primer
acgttggatggtggtctcaacttggctatc

SEQ ID NO: 108 - DNA, 30 bp, Artificial Sequence
  Description of Artificial Sequence: Synthetic primer
acgttggatgagtctgacaagagagtcagc

SEQ ID NO: 109 - DNA, 30 bp, Artificial Sequence
  Description of Artificial Sequence: Synthetic primer
acgttggatggccatccttctgtcttttcc

SEQ ID NO: 110 - DNA, 30 bp, Artificial Sequence
  Description of Artificial Sequence: Synthetic primer
acgttggatgcttttcccaagtgactcacc

SEQ ID NO: 111 - DNA, 30 bp, Artificial Sequence
  Description of Artificial Sequence: Synthetic primer
acgttggatggtgctatgatcaaatcaggg

SEQ ID NO: 112 - DNA, 30 bp, Artificial Sequence
  Description of Artificial Sequence: Synthetic primer
acgttggatgggaaaaccagacaagagcac

SEQ ID NO: 113 - DNA, 31 bp, Artificial Sequence; identical to SEQ ID NO: 19
  Description of Artificial Sequence: Synthetic primer

SEQ ID NO: 114 - DNA, 30 bp, Artificial Sequence
  Description of Artificial Sequence: Synthetic primer
acgttggatgcctactccgaacacacacac

SEQ ID NO: 115 - DNA, 30 bp, Artificial Sequence
  Description of Artificial Sequence: Synthetic primer
acgttggatgtcctgttgctggacactatc

SEQ ID NO: 116 - DNA, 30 bp, Artificial Sequence
  Description of Artificial Sequence: Synthetic primer
acgttggatgaggtgacagtgctgtacctg

SEQ ID NO: 117 - DNA, 30 bp, Artificial Sequence
  Description of Artificial Sequence: Synthetic primer
acgttggatgaagcaagataccgtctcaga

SEQ ID NO: 118 - DNA, 30 bp, Artificial Sequence
  Description of Artificial Sequence: Synthetic primer
acgttggatgtggagccacttatggagaac

SEQ ID NO: 119 - DNA, 30 bp, Artificial Sequence
  Description of Artificial Sequence: Synthetic primer
acgttggatgtaatcccagcactttgggag

SEQ ID NO: 120 - DNA, 30 bp, Artificial Sequence
  Description of Artificial Sequence: Synthetic primer
acgttggatgatagggcggcttttctcctg

SEQ ID NO: 121 - DNA, 30 bp, Artificial Sequence
  Description of Artificial Sequence: Synthetic primer
acgttggatgagtgctcagcaacgattacg

SEQ ID NO: 122 - DNA, 30 bp, Artificial Sequence
  Description of Artificial Sequence: Synthetic primer
acgttggatgggaaccgcagatggacaatg

SEQ ID NO: 123 - DNA, 31 bp, Artificial Sequence
  Description of Artificial Sequence: Synthetic primer
acgttggatgtcggacgcacacagactgtag

SEQ ID NO: 124 - DNA, 30 bp, Artificial Sequence
  Description of Artificial Sequence: Synthetic primer
acgttggatgtggtaagagacggacagttc

SEQ ID NO: 125 - DNA, 30 bp, Artificial Sequence
  Description of Artificial Sequence: Synthetic primer
acgttggatgttgctaggcaacaggcactc

SEQ ID NO: 126 - DNA, 30 bp, Artificial Sequence
  Description of Artificial Sequence: Synthetic primer
acgttggatgatgaaactaaggcacatggc

SEQ ID NO: 127 - DNA, 30 bp, Artificial Sequence
  Description of Artificial Sequence: Synthetic primer
acgttggatggctgaaatttgctaagaggg

SEQ ID NO: 128 - DNA, 30 bp, Artificial Sequence
  Description of Artificial Sequence: Synthetic primer
acgttggatgaggcggagaatgatccggtg

SEQ ID NO: 129 - DNA, 30 bp, Artificial Sequence
  Description of Artificial Sequence: Synthetic primer
acgttggatgttctccaaagcacccaagtg

SEQ ID NO: 130 - DNA, 30 bp, Artificial Sequence
  Description of Artificial Sequence: Synthetic primer
acgttggatgtgcttgggagcaagttacag

SEQ ID NO: 131 - DNA, 30 bp, Artificial Sequence
  Description of Artificial Sequence: Synthetic primer
acgttggatgttgtctccattcctccctgg

SEQ ID NO: 132 - DNA, 30 bp, Artificial Sequence
  Description of Artificial Sequence: Synthetic primer
acgttggatgtgagtctggtaggcaacttc

SEQ ID NO: 133 - DNA, 30 bp, Artificial Sequence
  Description of Artificial Sequence: Synthetic primer
acgttggatgtgatctcggctcactgcaag

SEQ ID NO: 134 - DNA, 30 bp, Artificial Sequence
  Description of Artificial Sequence: Synthetic primer
acgttggatgtggtgaaaccccatttctac

SEQ ID NO: 135 - DNA, 30 bp, Artificial Sequence
  Description of Artificial Sequence: Synthetic primer
acgttggatgtcaagtgattctcctgcctc

SEQ ID NO: 136 - DNA, 30 bp, Artificial Sequence
  Description of Artificial Sequence: Synthetic primer
acgttggatgtgagtctcactcttgttgcc

SEQ ID NO: 137 - DNA, 30 bp, Artificial Sequence
  Description of Artificial Sequence: Synthetic primer
acgttggatgtataggcgtgagccactatg

SEQ ID NO: 138 - DNA, 30 bp, Artificial Sequence
  Description of Artificial Sequence: Synthetic primer
acgttggatgtattggccagactggacttc

SEQ ID NO: 139 - DNA, 30 bp, Artificial Sequence
  Description of Artificial Sequence: Synthetic primer
acgttggatgggtttctgttcagagattcg

SEQ ID NO: 140 - DNA, 30 bp, Artificial Sequence
  Description of Artificial Sequence: Synthetic primer
acgttggatgtcagcctcccagggattaag

SEQ ID NO: 141 - DNA, 30 bp, Artificial Sequence
  Description of Artificial Sequence: Synthetic primer
acgttggatgtaatcccagctactcggaag

SEQ ID NO: 142 - DNA, 30 bp, Artificial Sequence
  Description of Artificial Sequence: Synthetic primer
acgttggatggtgctgggattataggcatg

SEQ ID NO: 143 - DNA, 30 bp, Artificial Sequence
  Description of Artificial Sequence: Synthetic primer
acgttggatgattacaggcatgagccactg

SEQ ID NO: 144 - DNA, 30 bp, Artificial Sequence
  Description of Artificial Sequence: Synthetic primer
acgttggatgtctgacaaagctggaagctg

SEQ ID NO: 145 - DNA, 31 bp, Artificial Sequence
  Description of Artificial Sequence: Synthetic primer
acgttggatggatattggtgagtatgcagag

SEQ ID NO: 146 - DNA, 30 bp, Artificial Sequence
  Description of Artificial Sequence: Synthetic primer
acgttggatgttccccccttctcctttttc

SEQ ID NO: 147 - DNA, 30 bp, Artificial Sequence
  Description of Artificial Sequence: Synthetic primer
acgttggatggtttggttcccagagacttc

SEQ ID NO: 148 - DNA, 30 bp, Artificial Sequence
  Description of Artificial Sequence: Synthetic primer
acgttggatgtcagcagaaaggagtgtgag

SEQ ID NO: 149 - DNA, 30 bp, Artificial Sequence
  Description of Artificial Sequence: Synthetic primer
acgttggatgtgacgcagtaagactccatc

SEQ ID NO: 150 - DNA, 30 bp, Artificial Sequence
  Description of Artificial Sequence: Synthetic primer
acgttggatgttgtacagcctgcaagcaac

SEQ ID NO: 151 - DNA, 30 bp, Artificial Sequence
  Description of Artificial Sequence: Synthetic primer
acgttggatggttggcgtttttgtttgcac

SEQ ID NO: 152 - DNA, 30 bp, Artificial Sequence
  Description of Artificial Sequence: Synthetic primer
acgttggatgtccctgcagaatactatgag

SEQ ID NO: 153 - DNA, 30 bp, Artificial Sequence
  Description of Artificial Sequence: Synthetic primer
acgttggatgggtgtgctttacaaatgctg

SEQ ID NO: 154 - DNA, 30 bp, Artificial Sequence; identical to SEQ ID NO: 149
  Description of Artificial Sequence: Synthetic primer

SEQ ID NO: 155 - DNA, 30 bp, Artificial Sequence
  Description of Artificial Sequence: Synthetic primer
acgttggatgacgtcttctgaggcacagag

SEQ ID NO: 156 - DNA, 30 bp, Artificial Sequence
  Description of Artificial Sequence: Synthetic primer
acgttggatgtgaccaacagaagtctcagg

SEQ ID NO: 157 - DNA, 29 bp, Artificial Sequence
  Description of Artificial Sequence: Synthetic primer
acgttggatgagtggactggcctgcaggt

SEQ ID NO: 158 - DNA, 30 bp, Artificial Sequence
  Description of Artificial Sequence: Synthetic primer
acgttggatgtgggtgacagcaagactcca

SEQ ID NO: 159 - DNA, 31 bp, Artificial Sequence
  Description of Artificial Sequence: Synthetic primer
acgttggatgcacaacaatgaaaggacaagc

SEQ ID NO: 160 - DNA, 30 bp, Artificial Sequence
  Description of Artificial Sequence: Synthetic primer
acgttggatgccccagttccttatctgatc

SEQ ID NO: 161 - DNA, 30 bp, Artificial Sequence
  Description of Artificial Sequence: Synthetic primer
acgttggatgtgactagctgggattatggg

SEQ ID NO: 162 - DNA, 30 bp, Artificial Sequence
  Description of Artificial Sequence: Synthetic primer
acgttggatgtcccttgattgtcatcacag

SEQ ID NO: 163 - DNA, 30 bp, Artificial Sequence
  Description of Artificial Sequence: Synthetic primer
acgttggatgtcctaggacacagtgtggac

SEQ ID NO: 164 - DNA, 30 bp, Artificial Sequence
  Description of Artificial Sequence: Synthetic primer
acgttggatgactactctactttctacccc

SEQ ID NO: 165 - DNA, 30 bp, Artificial Sequence
  Description of Artificial Sequence: Synthetic primer
acgttggatgaaagtgtagctgggcatggc

SEQ ID NO: 166 - DNA, 30 bp, Artificial Sequence
  Description of Artificial Sequence: Synthetic primer
acgttggatgcccaggttcaaacagttctc

SEQ ID NO: 167 - DNA, 30 bp, Artificial Sequence
  Description of Artificial Sequence: Synthetic primer
acgttggatgagcaggaactggcatttgag

SEQ ID NO: 168 - DNA, 30 bp, Artificial Sequence
  Description of Artificial Sequence: Synthetic primer
acgttggatggggtttcaggaacattcacc

SEQ ID NO: 169 - DNA, 30 bp, Artificial Sequence
  Description of Artificial Sequence: Synthetic primer
acgttggatgcttctgaaaaaggagaaggg

SEQ ID NO: 170 - DNA, 30 bp, Artificial Sequence
  Description of Artificial Sequence: Synthetic primer
acgttggatggagtggagatcatgccattg

SEQ ID NO: 171 - DNA, 30 bp, Artificial Sequence
  Description of Artificial Sequence: Synthetic primer
acgttggatgacagagcacaggtccctttc

SEQ ID NO: 172 - DNA, 30 bp, Artificial Sequence
  Description of Artificial Sequence: Synthetic primer
acgttggatggggatgaacagacaatcctc

SEQ ID NO: 173 - DNA, 30 bp, Artificial Sequence
  Description of Artificial Sequence: Synthetic primer
acgttggatgttgtagagacagggtcttgc

SEQ ID NO: 174 - DNA, 30 bp, Artificial Sequence
  Description of Artificial Sequence: Synthetic primer
acgttggatgttcttaatgtgcccactgtc

SEQ ID NO: 175 - DNA, 30 bp, Artificial Sequence
  Description of Artificial Sequence: Synthetic primer
acgttggatgggactccagtctgagtgaca

SEQ ID NO: 176 - DNA, 30 bp, Artificial Sequence
  Description of Artificial Sequence: Synthetic primer
acgttggatgatggtatgatctaggctccc

SEQ ID NO: 177 - DNA, 30 bp, Artificial Sequence
  Description of Artificial Sequence: Synthetic primer
acgttggatgaagcggtgattctcagcctc

SEQ ID NO: 178 - DNA, 31 bp, Artificial Sequence; identical to SEQ ID NO: 56
  Description of Artificial Sequence: Synthetic primer

SEQ ID NO: 179 - DNA, 30 bp, Artificial Sequence; identical to SEQ ID NO: 55
  Description of Artificial Sequence: Synthetic primer

SEQ ID NO: 180 - DNA, 30 bp, Artificial Sequence
  Description of Artificial Sequence: Synthetic primer
acgttggatgaccggaattactgagaggtc

SEQ ID NO: 181 - DNA, 30 bp, Artificial Sequence
  Description of Artificial Sequence: Synthetic primer
acgttggatggtccagggtgtttactgttc

SEQ ID NO: 182 - DNA, 30 bp, Artificial Sequence
  Description of Artificial Sequence: Synthetic primer
acgttggatggatcgtgccattgcactttg

SEQ ID NO: 183 - DNA, 30 bp, Artificial Sequence
  Description of Artificial Sequence: Synthetic primer
acgttggatggctgctggaagaaatagaag

SEQ ID NO: 184 - DNA, 30 bp, Artificial Sequence
  Description of Artificial Sequence: Synthetic primer
acgttggatggaactcattatccctgaggg

SEQ ID NO: 185 - DNA, 30 bp, Artificial Sequence
  Description of Artificial Sequence: Synthetic primer
acgttggatgttccaggtgttggtgaactg

SEQ ID NO: 186 - DNA, 30 bp, Artificial Sequence
  Description of Artificial Sequence: Synthetic primer
acgttggatgtttagccatgattctgcctc

SEQ ID NO: 187 - DNA, 30 bp, Artificial Sequence
  Description of Artificial Sequence: Synthetic primer
acgttggatgcaccttgggaaatacgttgc

SEQ ID NO: 188 - DNA, 30 bp, Artificial Sequence
  Description of Artificial Sequence: Synthetic primer
acgttggatgggcagacgaggaagtataac

SEQ ID NO: 189 - DNA, 30 bp, Artificial Sequence
  Description of Artificial Sequence: Synthetic primer
acgttggatgcctactacattcctttttgc

SEQ ID NO: 190 - DNA, 30 bp, Artificial Sequence
  Description of Artificial Sequence: Synthetic primer
acgttggatgaaaagacagtctcaggtggg

SEQ ID NO: 191 - DNA, 30 bp, Artificial Sequence
  Description of Artificial Sequence: Synthetic primer
acgttggatgtctgatttcccaggaacctc

SEQ ID NO: 192 - DNA, 30 bp, Artificial Sequence
  Description of Artificial Sequence: Synthetic primer
acgttggatgaaaaaatgagctgggcgtgg

SEQ ID NO: 193 - DNA, 30 bp, Artificial Sequence
  Description of Artificial Sequence: Synthetic primer
acgttggatgatcttggctcactgcagcct

SEQ ID NO: 194 - DNA, 30 bp, Artificial Sequence
  Description of Artificial Sequence: Synthetic primer
acgttggatgcaaagtgctgggattacagg

SEQ ID NO: 195 - DNA, 30 bp, Artificial Sequence
  Description of Artificial Sequence: Synthetic primer
acgttggatgtttcttcccccattgtaccc

SEQ ID NO: 196 - DNA, 30 bp, Artificial Sequence
  Description of Artificial Sequence: Synthetic primer
acgttggatgtgagagtaggcatgtggtac

SEQ ID NO: 197 - DNA, 30 bp, Artificial Sequence
  Description of Artificial Sequence: Synthetic primer
acgttggatgggaaaatcatactgagatgc

SEQ ID NO: 198 - DNA, 30 bp, Artificial Sequence
  Description of Artificial Sequence: Synthetic primer
acgttggatgcctgtaatcccggcactttg

SEQ ID NO: 199 - DNA, 30 bp, Artificial Sequence
  Description of Artificial Sequence: Synthetic primer
acgttggatgtcaagccattctcccacctc

SEQ ID NO: 200 - DNA, 30 bp, Artificial Sequence
  Description of Artificial Sequence: Synthetic primer
acgttggatgtccatcctgacccccgtttg

SEQ ID NO: 201 - DNA, 30 bp, Artificial Sequence
  Description of Artificial Sequence: Synthetic primer
acgttggatgctttgaaatggccccatcac

SEQ ID NO: 202 - DNA, 30 bp, Artificial Sequence
  Description of Artificial Sequence: Synthetic primer
acgttggatgctgaactgaccgtctcattc

SEQ ID NO: 203 - DNA, 30 bp, Artificial Sequence
  Description of Artificial Sequence: Synthetic primer
acgttggatgatgtttctcctgccttggtg

SEQ ID NO: 204 - DNA, 30 bp, Artificial Sequence
  Description of Artificial Sequence: Synthetic primer
acgttggatgtggaagtttgagaaccgctg

SEQ ID NO: 205 - DNA, 30 bp, Artificial Sequence
  Description of Artificial Sequence: Synthetic primer
acgttggatggcacattctgggctattaac

SEQ ID NO: 206 - DNA, 30 bp, Artificial Sequence
  Description of Artificial Sequence: Synthetic primer
acgttggatgccacttctttcccacctatg

SEQ ID NO: 207 - DNA, 30 bp, Artificial Sequence
  Description of Artificial Sequence: Synthetic primer
acgttggatgtgctacagcttctccagcag

SEQ ID NO: 208 - DNA, 30 bp, Artificial Sequence
  Description of Artificial Sequence: Synthetic primer
acgttggatgccaggttcaagcgattctcc

SEQ ID NO: 209 - DNA, 30 bp, Artificial Sequence
  Description of Artificial Sequence: Synthetic primer
acgttggatgaatggggtgtttctggagca

SEQ ID NO: 210 - DNA, 30 bp, Artificial Sequence
  Description of Artificial Sequence: Synthetic primer
acgttggatgggagttcaagataagcctgg

SEQ ID NO: 211 - DNA, 30 bp, Artificial Sequence
  Description of Artificial Sequence: Synthetic primer
acgttggatgaatcttgctctgtcacccag

SEQ ID NO: 212 - DNA, 31 bp, Artificial Sequence
  Description of Artificial Sequence: Synthetic primer
acgttggatgccaggagaatcacttttatgg

SEQ ID NO: 213 - DNA, 30 bp, Artificial Sequence
  Description of Artificial Sequence: Synthetic primer
acgttggatgtttggcctcccaaagtactg

SEQ ID NO: 214 - DNA, 30 bp, Artificial Sequence
  Description of Artificial Sequence: Synthetic primer
acgttggatgttacctctcctggccagttc

SEQ ID NO: 215 - DNA, 30 bp, Artificial Sequence
  Description of Artificial Sequence: Synthetic primer
acgttggatgaactttggcctcccaaagtg

SEQ ID NO: 216 - DNA, 31 bp, Artificial Sequence
  Description of Artificial Sequence: Synthetic primer
acgttggatgcagtctaatctctcttttccc

SEQ ID NO: 217 - DNA, 30 bp, Artificial Sequence
  Description of Artificial Sequence: Synthetic primer
acgttggatgaggaggatgcacttatgtgg

SEQ ID NO: 218 - DNA, 30 bp, Artificial Sequence
  Description of Artificial Sequence: Synthetic primer
acgttggatggttttggactcttgacctgc

SEQ ID NO: 219 - DNA, 30 bp, Artificial Sequence
  Description of Artificial Sequence: Synthetic primer
acgttggatgccctcatctggaaatgtgtg

SEQ ID NO: 220 - DNA, 30 bp, Artificial Sequence
  Description of Artificial Sequence: Synthetic primer
acgttggatgcctgactctacagttcttgc

SEQ ID NO: 221 - DNA, 30 bp, Artificial Sequence
  Description of Artificial Sequence: Synthetic primer
acgttggatgtccaggaacagacggaggtc

SEQ ID NO: 222 - DNA, 30 bp, Artificial Sequence
  Description of Artificial Sequence: Synthetic primer
acgttggatggctttctgcagaggttgtcg

SEQ ID NO: 223 - DNA, 30 bp, Artificial Sequence
  Description of Artificial Sequence: Synthetic primer
acgttggatgtttggatgctggcacttgtg

SEQ ID NO: 224 - DNA, 30 bp, Artificial Sequence
  Description of Artificial Sequence: Synthetic primer
acgttggatgcagaagactacctgatttgc

SEQ ID NO: 225 - DNA, 30 bp, Artificial Sequence
  Description of Artificial Sequence: Synthetic primer
acgttggatggttagtgagtcggtgacatc

SEQ ID NO: 226 - DNA, 30 bp, Artificial Sequence
  Description of Artificial Sequence: Synthetic primer
acgttggatgacctcagatgatctgcccac

SEQ ID NO: 227 - DNA, 30 bp, Artificial Sequence
  Description of Artificial Sequence: Synthetic primer
acgttggatgagccagggcaacgtttgaag

SEQ ID NO: 228 - DNA, 30 bp, Artificial Sequence
  Description of Artificial Sequence: Synthetic primer
acgttggatgtgctgtgatgcacctttgac

SEQ ID NO: 229 - DNA, 30 bp, Artificial Sequence
  Description of Artificial Sequence: Synthetic primer
acgttggatgattcaagcagttctcgtgcc

SEQ ID NO: 230 - DNA, 30 bp, Artificial Sequence
  Description of Artificial Sequence: Synthetic primer
acgttggatgccagataggattccaggttc

SEQ ID NO: 231 - DNA, 30 bp, Artificial Sequence
  Description of Artificial Sequence: Synthetic primer
acgttggatgtcctttacctacccacatcc

SEQ ID NO: 232 - DNA, 30 bp, Artificial Sequence
  Description of Artificial Sequence: Synthetic primer
acgttggatgagtggctcatgcctgtaatc

SEQ ID NO: 233 - DNA, 30 bp, Artificial Sequence
  Description of Artificial Sequence: Synthetic primer
acgttggatgaaaagaatggctggccacag

SEQ ID NO: 234 - DNA, 30 bp, Artificial Sequence
  Description of Artificial Sequence: Synthetic primer
acgttggatgacaccactgcactctagctc

SEQ ID NO: 235 - DNA, 30 bp, Artificial Sequence
  Description of Artificial Sequence: Synthetic primer
acgttggatgtgactctgttccatcctctg

SEQ ID NO: 236 - DNA, 30 bp, Artificial Sequence; identical to SEQ ID NO: 24
  Description of Artificial Sequence: Synthetic primer

SEQ ID NO: 237 - DNA, 30 bp, Artificial Sequence
  Description of Artificial Sequence: Synthetic primer
acgttggatgattataggcatgaggcaccg

SEQ ID NO: 238 - DNA, 30 bp, Artificial Sequence
  Description of Artificial Sequence: Synthetic primer
acgttggatgtcacaccttccgaggattag

SEQ ID NO: 239 - DNA, 30 bp, Artificial Sequence
  Description of Artificial Sequence: Synthetic primer
acgttggatgacaaagaacagtgagagggc

SEQ ID NO: 240 - DNA, 30 bp, Artificial Sequence
  Description of Artificial Sequence: Synthetic primer
acgttggatgccgggaaatggaataattcc

SEQ ID NO: 241 - DNA, 30 bp, Artificial Sequence
  Description of Artificial Sequence: Synthetic primer
acgttggatgaccccaactgaaacacagac

SEQ ID NO: 242 - DNA, 30 bp, Artificial Sequence
  Description of Artificial Sequence: Synthetic primer
acgttggatgcatgtttgccaggctggact

SEQ ID NO: 243 - DNA, 30 bp, Artificial Sequence
  Description of Artificial Sequence: Synthetic primer
acgttggatgcctgggaactgaatgtctcg

SEQ ID NO: 244 - DNA, 30 bp, Artificial Sequence
  Description of Artificial Sequence: Synthetic primer
acgttggatggagggctgcaggttgagaaa

SEQ ID NO: 245 - DNA, 30 bp, Artificial Sequence
  Description of Artificial Sequence: Synthetic primer
acgttggatgagatcacagagtgaggagag

SEQ ID NO: 246 - DNA, 30 bp, Artificial Sequence
  Description of Artificial Sequence: Synthetic primer
acgttggatgggaaagcgtatctgcagagg

SEQ ID NO: 247 - DNA, 30 bp, Artificial Sequence; identical to SEQ ID NO: 148
  Description of Artificial Sequence: Synthetic primer

SEQ ID NO: 248 - DNA, 30 bp, Artificial Sequence
  Description of Artificial Sequence: Synthetic primer
acgttggatgtctgtatctgagcctcactg

SEQ ID NO: 249 - DNA, 31 bp, Artificial Sequence
  Description of Artificial Sequence: Synthetic primer
acgttggatgcttataatctaccctcttagc

SEQ ID NO: 250 - DNA, 30 bp, Artificial Sequence
  Description of Artificial Sequence: Synthetic primer
acgttggatggacagttactactagcaagc

SEQ ID NO: 251 - DNA, 30 bp, Artificial Sequence
  Description of Artificial Sequence: Synthetic primer
acgttggatgacgccatcattcgtgcatcc

SEQ ID NO: 252 - DNA, 30 bp, Artificial Sequence
  Description of Artificial Sequence: Synthetic primer
acgttggatgatgctgggcttgctttttcc

SEQ ID NO: 253 - DNA, 30 bp, Artificial Sequence
  Description of Artificial Sequence: Synthetic primer
acgttggatgttccccctcctggtatttac

SEQ ID NO: 254 - DNA, 30 bp, Artificial Sequence
  Description of Artificial Sequence: Synthetic primer
acgttggatgtcttgtcttgccctctcgct

SEQ ID NO: 255 - DNA, 30 bp, Artificial Sequence
  Description of Artificial Sequence: Synthetic primer
acgttggatgtagaagccagtcgctacatc

SEQ ID NO: 256 - DNA, 30 bp, Artificial Sequence
  Description of Artificial Sequence: Synthetic primer
acgttggatgaaattagctgggcatggtgg

SEQ ID NO: 257 - DNA, 30 bp, Artificial Sequence
  Description of Artificial Sequence: Synthetic primer
acgttggatgggttcaagggattctcctgc

SEQ ID NO: 258 - DNA, 30 bp, Artificial Sequence
  Description of Artificial Sequence: Synthetic primer
acgttggatgcccacctctactgaaaatac

SEQ ID NO: 259 - DNA, 30 bp, Artificial Sequence
  Description of Artificial Sequence: Synthetic primer
acgttggatgcaggagaatcacttgaaccc

SEQ ID NO: 260 - DNA, 30 bp, Artificial Sequence
  Description of Artificial Sequence: Synthetic primer
acgttggatgctattggaagctacatgctc

SEQ ID NO: 261 - DNA, 30 bp, Artificial Sequence
  Description of Artificial Sequence: Synthetic primer
acgttggatgagttactcaggaggctaagg

SEQ ID NO: 262 - DNA, 30 bp, Artificial Sequence
  Description of Artificial Sequence: Synthetic primer
acgttggatgtgcagtgagcctagatcatg

SEQ ID NO: 263 - DNA, 30 bp, Artificial Sequence
  Description of Artificial Sequence: Synthetic primer
acgttggatgacatggtgaaaactcgtctc

SEQ ID NO: 264 - DNA, 30 bp, Artificial Sequence
  Description of Artificial Sequence: Synthetic primer
acgttggatgacggtggctcacttcaacct

SEQ ID NO: 265 - DNA, 30 bp, Artificial Sequence
  Description of Artificial Sequence: Synthetic primer
acgttggatgtactccgaacacacacacac

SEQ ID NO: 266 - DNA, 30 bp, Artificial Sequence
  Description of Artificial Sequence: Synthetic primer
acgttggatgcacgcgcagttcaatttctc

SEQ ID NO: 267 - DNA, 30 bp, Artificial Sequence
  Description of Artificial Sequence: Synthetic primer
acgttggatgctgataaacaaggctgtggg

SEQ ID NO: 268 - DNA, 30 bp, Artificial Sequence
  Description of Artificial Sequence: Synthetic primer
acgttggatgaactgttttccacagcaggg

SEQ ID NO: 269 - DNA, 30 bp, Artificial Sequence
  Description of Artificial Sequence: Synthetic primer
acgttggatgatgaggtaacttacctaatg

SEQ ID NO: 270 - DNA, 30 bp, Artificial Sequence
  Description of Artificial Sequence: Synthetic primer
acgttggatgaggatgacttactcaccagc

SEQ ID NO: 271 - DNA, 30 bp, Artificial Sequence; identical to SEQ ID NO: 124
  Description of Artificial Sequence: Synthetic primer

SEQ ID NO: 272 - DNA, 30 bp, Artificial Sequence; identical to SEQ ID NO: 194
  Description of Artificial Sequence: Synthetic primer

SEQ ID NO: 273 - DNA, 30 bp, Artificial Sequence
  Description of Artificial Sequence: Synthetic primer
acgttggatgagatcgcgccattgcactca

SEQ ID NO: 274 - DNA, 30 bp, Artificial Sequence
  Description of Artificial Sequence: Synthetic primer
acgttggatgtctcatagtattctgcaggg

SEQ ID NO: 275 - DNA, 30 bp, Artificial Sequence
  Description of Artificial Sequence: Synthetic primer
acgttggatgagagtgttgggattacaggc

SEQ ID NO: 276 - DNA, 30 bp, Artificial Sequence
  Description of Artificial Sequence: Synthetic primer
acgttggatgaactgagatcactccactgc

SEQ ID NO: 277 - DNA, 30 bp, Artificial Sequence; identical to SEQ ID NO: 194
  Description of Artificial Sequence: Synthetic primer

SEQ ID NO: 278 - DNA, 29 bp, Artificial Sequence
  Description of Artificial Sequence: Synthetic primer
acgttggatggctgttagaggctggcagg

SEQ ID NO: 279 - DNA, 30 bp, Artificial Sequence
  Description of Artificial Sequence: Synthetic primer
acgttggatgttgacctcaggtgatccatc

SEQ ID NO: 280 - DNA, 18 bp, Artificial Sequence
  Description of Artificial Sequence: Synthetic primer
tgcaggtgagcactgccc

SEQ ID NO: 281 - DNA, 17 bp, Artificial Sequence
  Description of Artificial Sequence: Synthetic primer
gcaagactccatctcaa

SEQ ID NO: 282 - DNA, 21 bp, Artificial Sequence
  Description of Artificial Sequence: Synthetic primer
aagcatagatcagataaggaa

SEQ ID NO: 283 - DNA, 20 bp, Artificial Sequence
  Description of Artificial Sequence: Synthetic primer
atctatgcttgtcctttcat

SEQ ID NO: 284 - DNA, 19 bp, Artificial Sequence
  Description of Artificial Sequence: Synthetic primer
gctcagctactttttgtat

SEQ ID NO: 285 - DNA, 18 bp, Artificial Sequence
  Description of Artificial Sequence: Synthetic primer
caagatggtgtcttcggc

SEQ ID NO: 286 - DNA, 19 bp, Artificial Sequence
  Description of Artificial Sequence: Synthetic primer
acagtgtggaccgatttcc

SEQ ID NO: 287 - DNA, 17 bp, Artificial Sequence
  Description of Artificial Sequence: Synthetic primer
agacaagtctcactctg

SEQ ID NO: 288 - DNA, 19 bp, Artificial Sequence
  Description of Artificial Sequence: Synthetic primer
ggcggctcacacctgtaat

SEQ ID NO: 289 - DNA, 17 bp, Artificial Sequence
  Description of Artificial Sequence: Synthetic primer
ctcctgcctcagcctcc

SEQ ID NO: 290 - DNA, 17 bp, Artificial Sequence
  Description of Artificial Sequence: Synthetic primer
tggcatttgagacagga

SEQ ID NO: 291 - DNA, 21 bp, Artificial Sequence
  Description of Artificial Sequence: Synthetic primer
cattcaccatgtctgtgtgag

SEQ ID NO: 292 - DNA, 22 bp, Artificial Sequence
  Description of Artificial Sequence: Synthetic primer
cttcataaaagaaaagatgaca

SEQ ID NO: 293 - DNA, 20 bp, Artificial Sequence
  Description of Artificial Sequence: Synthetic primer
catgccattgtactccagcc

SEQ ID NO: 294 - DNA, 19 bp, Artificial Sequence
  Description of Artificial Sequence: Synthetic primer
cctgccagcctctaacagc

SEQ ID NO: 295 - DNA, 18 bp, Artificial Sequence
  Description of Artificial Sequence: Synthetic primer
tagtgatgtctgcttcag

SEQ ID NO: 296 - DNA, 17 bp, Artificial Sequence
  Description of Artificial Sequence: Synthetic primer
ttgcccaggctggcctc

SEQ ID NO: 297 - DNA, 19 bp, Artificial Sequence
  Description of Artificial Sequence: Synthetic primer
gaatgccaacctcccttcc

SEQ ID NO: 298 - DNA, 17 bp, Artificial Sequence
  Description of Artificial Sequence: Synthetic primer
tctgagtgacagagcga

SEQ ID NO: 299 - DNA, 18 bp, Artificial Sequence
  Description of Artificial Sequence: Synthetic primer
gctccccgcaacctccgc

SEQ ID NO: 300 - DNA, 18 bp, Artificial Sequence
  Description of Artificial Sequence: Synthetic primer
gcctcggccgcaatcaca

SEQ ID NO: 301 - DNA, 19 bp, Artificial Sequence
  Description of Artificial Sequence: Synthetic primer
cggtcaccgtgatgatggg

SEQ ID NO: 302 - DNA, 20 bp, Artificial Sequence
  Description of Artificial Sequence: Synthetic primer
agaatcccgagagatggtac

SEQ ID NO: 303 - DNA, 19 bp, Artificial Sequence
  Description of Artificial Sequence: Synthetic primer
gtccttcacctgagcttcc

SEQ ID NO: 304 - DNA, 22 bp, Artificial Sequence
  Description of Artificial Sequence: Synthetic primer
gtgtttactgttcaaggcaagt

SEQ ID NO: 305 - DNA, 17 bp, Artificial Sequence
  Description of Artificial Sequence: Synthetic primer
ggcaacagagcaagact

SEQ ID NO: 306 - DNA, 22 bp, Artificial Sequence
  Description of Artificial Sequence: Synthetic primer
actgagaaacatcatccctggg

SEQ ID NO: 307 - DNA, 18 bp, Artificial Sequence
  Description of Artificial Sequence: Synthetic primer
agtcacaggcagttcacc

SEQ ID NO: 308 - DNA, 20 bp, Artificial Sequence
  Description of Artificial Sequence: Synthetic primer
ctgtgactcctctcctcccc

SEQ ID NO: 309 - DNA, 19 bp, Artificial Sequence
  Description of Artificial Sequence: Synthetic primer
ctgttttatacctgcacac

SEQ ID NO: 310 - DNA, 18 bp, Artificial Sequence
  Description of Artificial Sequence: Synthetic primer
acgccaggcaggctctca

SEQ ID NO: 311 - DNA, 21 bp, Artificial Sequence
  Description of Artificial Sequence: Synthetic primer
cgcctactgccagagcaagct

SEQ ID NO: 312 - DNA, 24 bp, Artificial Sequence
  Description of Artificial Sequence: Synthetic primer
attcctttttgctgaaataatgaa

SEQ ID NO: 313 - DNA, 17 bp, Artificial Sequence
  Description of Artificial Sequence: Synthetic primer
tggggcgtgatggctca

SEQ ID NO: 314 - DNA, 17 bp, Artificial Sequence
  Description of Artificial Sequence: Synthetic primer
caacagaaccaccttcc

SEQ ID NO: 315 - DNA, 17 bp, Artificial Sequence
  Description of Artificial Sequence: Synthetic primer
gtgcacacctgtaatcc

SEQ ID NO: 316 - DNA, 20 bp, Artificial Sequence
  Description of Artificial Sequence: Synthetic primer
cagggctcaagcgattctcc

SEQ ID NO: 317 - DNA, 17 bp, Artificial Sequence
  Description of Artificial Sequence: Synthetic primer
tcgcctggccaaaaaaa

SEQ ID NO: 318 - DNA, 22 bp, Artificial Sequence
  Description of Artificial Sequence: Synthetic primer
cattgtaccccaggttgaaaat

SEQ ID NO: 319 - DNA, 22 bp, Artificial Sequence
  Description of Artificial Sequence: Synthetic primer
gtggtaccacacccagctaatt

SEQ ID NO: 320 - DNA, 23 bp, Artificial Sequence
  Description of Artificial Sequence: Synthetic primer
atcatactgagatgctatcagaa

SEQ ID NO: 321 - DNA, 19 bp, Artificial Sequence
  Description of Artificial Sequence: Synthetic primer
gcactttgggaggttgagg

SEQ ID NO: 322 - DNA, 21 bp, Artificial Sequence
  Description of Artificial Sequence: Synthetic primer
cattctcccacctcagccccc

SEQ ID NO: 323 - DNA, 19 bp, Artificial Sequence
  Description of Artificial Sequence: Synthetic primer
cccgtttgatttccgggtc

SEQ ID NO: 324 - DNA, 17 bp, Artificial Sequence
  Description of Artificial Sequence: Synthetic primer
ggccccatcacccaaaa

SEQ ID NO: 325 - DNA, 19 bp, Artificial Sequence
  Description of Artificial Sequence: Synthetic primer
gaccgtctcattcacaaac

SEQ ID NO: 326 - DNA, 20 bp, Artificial Sequence
  Description of Artificial Sequence: Synthetic primer
ttggtgcttcactctgagac

SEQ ID NO: 327 - DNA, 20 bp, Artificial Sequence
  Description of Artificial Sequence: Synthetic primer
gagaaccgctgatcaatgca

SEQ ID NO: 328 - DNA, 17 bp, Artificial Sequence
  Description of Artificial Sequence: Synthetic primer
gcatgcagctcccgtcc

SEQ ID NO: 329 - DNA, 20 bp, Artificial Sequence
  Description of Artificial Sequence: Synthetic primer
ccacctatggccgcgcccct

SEQ ID NO: 330 - DNA, 21 bp, Artificial Sequence
  Description of Artificial Sequence: Synthetic primer
cagggacccatacctgtggtc

SEQ ID NO: 331 - DNA, 20 bp, Artificial Sequence
  Description of Artificial Sequence: Synthetic primer
tcagcctcctgagtagctgg

SEQ ID NO: 332 - DNA, 19 bp, Artificial Sequence
  Description of Artificial Sequence: Synthetic primer
gtttctggagcactccggt

SEQ ID NO: 333 - DNA, 17 bp, Artificial Sequence
  Description of Artificial Sequence: Synthetic primer
gataagcctggccaaca

SEQ ID NO: 334 - DNA, 20 bp, Artificial Sequence
  Description of Artificial Sequence: Synthetic primer
atgatctcggctcactgcaa

SEQ ID NO: 335 - DNA, 23 bp, Artificial Sequence
  Description of Artificial Sequence: Synthetic primer
tatggatctttctagtcttgttt

SEQ ID NO: 336 - DNA, 17 bp, Artificial Sequence
  Description of Artificial Sequence: Synthetic primer
actgattacaggcgtgc

SEQ ID NO: 337 - DNA, 18 bp, Artificial Sequence
  Description of Artificial Sequence: Synthetic primer
cccgatgcctgtgttggc

SEQ ID NO: 338 - DNA, 17 bp, Artificial Sequence
  Description of Artificial Sequence: Synthetic primer
agtgctgggattacagg

SEQ ID NO: 339 - DNA, 21 bp, Artificial Sequence
  Description of Artificial Sequence: Synthetic primer
aatctctcttttccctacaca

SEQ ID NO: 340 - DNA, 17 bp, Artificial Sequence
  Description of Artificial Sequence: Synthetic primer
taatgcgtacagcagcc

SEQ ID NO: 341 - DNA, 20 bp, Artificial Sequence
  Description of Artificial Sequence: Synthetic primer
actggaggaggatgcactta

SEQ ID NO: 342 - DNA, 21 bp, Artificial Sequence
  Description of Artificial Sequence: Synthetic primer
atgcacagaaacaaggatcta

SEQ ID NO: 343 - DNA, 23 bp, Artificial Sequence
  Description of Artificial Sequence: Synthetic primer
cttgcttttttttttttggacag

SEQ ID NO: 344 - DNA, 19 bp, Artificial Sequence
  Description of Artificial Sequence: Synthetic primer
gcaccccgagcctttccag

SEQ ID NO: 345 - DNA, 23 bp, Artificial Sequence
  Description of Artificial Sequence: Synthetic primer
ttgtcgtaagtctctcctctctt

SEQ ID NO: 346 - DNA, 20 bp, Artificial Sequence
  Description of Artificial Sequence: Synthetic primer
cgggaaggttgaagttggac

SEQ ID NO: 347 - DNA, 18 bp, Artificial Sequence
  Description of Artificial Sequence: Synthetic primer
ccatttacaaccaattgc

SEQ ID NO: 348 - DNA, 20 bp, Artificial Sequence
  Description of Artificial Sequence: Synthetic primer
cttgtgggacttctttttta

SEQ ID NO: 349 - DNA, 17 bp, Artificial Sequence
  Description of Artificial Sequence: Synthetic primer
accctggcctccctaac

SEQ ID NO: 350 - DNA, 24 bp, Artificial Sequence
  Description of Artificial Sequence: Synthetic primer
gggcaacgtttgaagatgctctgc

SEQ ID NO: 351 - DNA, 19 bp, Artificial Sequence
  Description of Artificial Sequence: Synthetic primer
cacctttgactcttgagcc

SEQ ID NO: 352 - DNA, 20 bp, Artificial Sequence
  Description of Artificial Sequence: Synthetic primer
tagctatgtgccaccatgcc

SEQ ID NO: 353 - DNA, 21 bp, Artificial Sequence
  Description of Artificial Sequence: Synthetic primer
gattgtagctaactcacaagg

SEQ ID NO: 354 - DNA, 22 bp, Artificial Sequence
  Description of Artificial Sequence: Synthetic primer
tacctacccacatcctataaaa

SEQ ID NO: 355 - DNA, 17 bp, Artificial Sequence
  Description of Artificial Sequence: Synthetic primer
cctgtaatcccggcact

SEQ ID NO: 356 - DNA, 17 bp, Artificial Sequence
  Description of Artificial Sequence: Synthetic primer
ctggccacagtggctca

SEQ ID NO: 357 - DNA, 18 bp, Artificial Sequence
  Description of Artificial Sequence: Synthetic primer
cgggtgacgaagcctgac

SEQ ID NO: 358 - DNA, 20 bp, Artificial Sequence
  Description of Artificial Sequence: Synthetic primer
tcctctgtgcaaaatcctcc

SEQ ID NO: 359 - DNA, 18 bp, Artificial Sequence
  Description of Artificial Sequence: Synthetic primer
ctccatcctgacccccgt

SEQ ID NO: 360 - DNA, 17 bp, Artificial Sequence
  Description of Artificial Sequence: Synthetic primer
ctgtggaattgtgcctc

SEQ ID NO: 361 - DNA, 20 bp, Artificial Sequence
  Description of Artificial Sequence: Synthetic primer
catgtcccacagaggctaac

SEQ ID NO: 362 - DNA, 20 bp, Artificial Sequence
  Description of Artificial Sequence: Synthetic primer
gagagggcaatgcctcagag

SEQ ID NO: 363 - DNA, 20 bp, Artificial Sequence
  Description of Artificial Sequence: Synthetic primer
ttctgggattctctagaggg

SEQ ID NO: 364 - DNA, 21 bp, Artificial Sequence
  Description of Artificial Sequence: Synthetic primer
agacatcatcacatcacacca

SEQ ID NO: 365 - DNA, 18 bp, Artificial Sequence
  Description of Artificial Sequence: Synthetic primer
ccaggctggactcgaact

SEQ ID NO: 366 - DNA, 23 bp, Artificial Sequence
  Description of Artificial Sequence: Synthetic primer
actgaatgtctcggtataaaacc

SEQ ID NO: 367 - DNA, 18 bp, Artificial Sequence
  Description of Artificial Sequence: Synthetic primer
caggttgagaaagctcta

SEQ ID NO: 368 - DNA, 20 bp, Artificial Sequence
  Description of Artificial Sequence: Synthetic primer
cagagtgaggagagtgagac

SEQ ID NO: 369 - DNA, 20 bp, Artificial Sequence
  Description of Artificial Sequence: Synthetic primer
gagcggttagaagatgtgct

SEQ ID NO: 370 - DNA, 18 bp, Artificial Sequence
  Description of Artificial Sequence: Synthetic primer
aagcctgtaggcttttaa

SEQ ID NO: 371 - DNA, 22 bp, Artificial Sequence
  Description of Artificial Sequence: Synthetic primer
gggatgactgaatgagacagta

SEQ ID NO: 372 - DNA, 21 bp, Artificial Sequence
  Description of Artificial Sequence: Synthetic primer
ccctcttagcaaatttcagct

SEQ ID NO: 373 - DNA, 21 bp, Artificial Sequence
  Description of Artificial Sequence: Synthetic primer
taacttttttgtgtgtgagaa

SEQ ID NO: 374 - DNA, 19 bp, Artificial Sequence
  Description of Artificial Sequence: Synthetic primer
cgtgcatccttcccaccta

SEQ ID NO: 375 - DNA, 18 bp, Artificial Sequence
  Description of Artificial Sequence: Synthetic primer
gtactcaagatgatgtaa

SEQ ID NO: 376 - DNA, 19 bp, Artificial Sequence
  Description of Artificial Sequence: Synthetic primer
ttacaccctggagtggtcc

SEQ ID NO: 377 - DNA, 18 bp, Artificial Sequence
  Description of Artificial Sequence: Synthetic primer
tgccctctcgctggctgg

SEQ ID NO: 378 - DNA, 19 bp, Artificial Sequence
  Description of Artificial Sequence: Synthetic primer
caaagggaggtggtcgcac

SEQ ID NO: 379 - DNA, 19 bp, Artificial Sequence
  Description of Artificial Sequence: Synthetic primer
caggagaatggtgtgaacc

SEQ ID NO: 380 - DNA, 17 bp, Artificial Sequence
  Description of Artificial Sequence: Synthetic primer
agctgggattacaggca

SEQ ID NO: 381 - DNA, 20 bp, Artificial Sequence
  Description of Artificial Sequence: Synthetic primer
tacaaaattagctgggcatg

SEQ ID NO: 382 - DNA, 17 bp, Artificial Sequence
  Description of Artificial Sequence: Synthetic primer
ctgtgagccgagattgc

SEQ ID NO: 383 - DNA, 17 bp, Artificial Sequence
  Description of Artificial Sequence: Synthetic primer
ctcaatgtgatcctcct

SEQ ID NO: 384 - DNA, 21 bp, Artificial Sequence
  Description of Artificial Sequence: Synthetic primer
gcaggagaatcacttgaactt

SEQ ID NO: 385 - DNA, 19 bp, Artificial Sequence
  Description of Artificial Sequence: Synthetic primer
agatcatgccattgccagc

SEQ ID NO: 386 - DNA, 17 bp, Artificial Sequence
  Description of Artificial Sequence: Synthetic primer
acagaagttagctgggc

SEQ ID NO: 387 - DNA, 20 bp, Artificial Sequence
  Description of Artificial Sequence: Synthetic primer
cttcaacctccgcctcctgg

SEQ ID NO: 388 - DNA, 19 bp, Artificial Sequence
  Description of Artificial Sequence: Synthetic primer
gaaaagcatgggccgggca

SEQ ID NO: 389 - DNA, 20 bp, Artificial Sequence
  Description of Artificial Sequence: Synthetic primer
catactcaccaatatctgct

SEQ ID NO: 390 - DNA, 20 bp, Artificial Sequence
  Description of Artificial Sequence: Synthetic primer
gctttgtgttctttctagtc

SEQ ID NO: 391 - DNA, 20 bp, Artificial Sequence
  Description of Artificial Sequence: Synthetic primer
gccagcaatgcacgcgcagt

SEQ ID NO: 392 - DNA, 22 bp, Artificial Sequence
  Description of Artificial Sequence: Synthetic primer
gtaacttacctaatgatagagg

SEQ ID NO: 393 - DNA, 17 bp, Artificial Sequence
  Description of Artificial Sequence: Synthetic primer
tgactcctttggactgg

SEQ ID NO: 394 - DNA, 18 bp, Artificial Sequence
  Description of Artificial Sequence: Synthetic primer
cagttcggtgaagtggtt

SEQ ID NO: 395 - DNA, 18 bp, Artificial Sequence
  Description of Artificial Sequence: Synthetic primer
ggtgtgagccaccacgcc

SEQ ID NO: 396 - DNA, 19 bp, Artificial Sequence
  Description of Artificial Sequence: Synthetic primer
agactccctctcaaaataa

SEQ ID NO: 397 - DNA, 21 bp, Artificial Sequence
  Description of Artificial Sequence: Synthetic primer
agggataagcatgaaaccact

SEQ ID NO: 398 - DNA, 17 bp, Artificial Sequence
  Description of Artificial Sequence: Synthetic primer
gcgtgagccaccacgcc

SEQ ID NO: 399 - DNA, 19 bp, Artificial Sequence
  Description of Artificial Sequence: Synthetic primer
gggtgacaaagtgagactc

SEQ ID NO: 400 - DNA, 17 bp, Artificial Sequence
  Description of Artificial Sequence: Synthetic primer
cacgcctggctaagcct

SEQ ID NO: 401 - DNA, 20 bp, Artificial Sequence
  Description of Artificial Sequence: Synthetic primer
ggctggcaggccaggtcaac

SEQ ID NO: 402 - DNA, 17 bp, Artificial Sequence
  Description of Artificial Sequence: Synthetic primer
gtgctgggattacaggc

SEQ ID NO: 403 - DNA, 30 bp, Artificial Sequence; identical to SEQ ID NO: 79
  Description of Artificial Sequence: Synthetic primer

SEQ ID NO: 404 - DNA, 30 bp, Artificial Sequence; identical to SEQ ID NO: 202
  Description of Artificial Sequence: Synthetic primer

SEQ ID NO: 405 - DNA, 20 bp, Artificial Sequence
  Description of Artificial Sequence: Synthetic primer
tgaccgtctcattcacaaac

SEQ ID NO: 406 - DNA, 30 bp, Artificial Sequence
  Description of Artificial Sequence: Synthetic primer
acgttggatgacagttcttggctatcctgg

SEQ ID NO: 407 - DNA, 30 bp, Artificial Sequence
  Description of Artificial Sequence: Synthetic primer
acgttggatggaaagggattgactcaggag

SEQ ID NO: 408 - DNA, 30 bp, Artificial Sequence
  Description of Artificial Sequence: Synthetic primer
acgttggatgttgaaggactgatctatggg

SEQ ID NO: 409 - DNA, 30 bp, Artificial Sequence
  Description of Artificial Sequence: Synthetic primer
acgttggatgcagactggaaatgcgcaatg

SEQ ID NO: 410 - DNA, 30 bp, Artificial Sequence
  Description of Artificial Sequence: Synthetic primer
acgttggatgtgttcatgtcttcggcatcc

SEQ ID NO: 411 - DNA, 30 bp, Artificial Sequence
  Description of Artificial Sequence: Synthetic primer
acgttggatgaggaatgcttacaacggagg

SEQ ID NO: 412 - DNA, 30 bp, Artificial Sequence
  Description of Artificial Sequence: Synthetic primer
acgttggatgttgccttgaaggtaggcatg

SEQ ID NO: 413 - DNA, 30 bp, Artificial Sequence
  Description of Artificial Sequence: Synthetic primer
acgttggatgccggccaagaccaatacatc

SEQ ID NO: 414 - DNA, 30 bp, Artificial Sequence
  Description of Artificial Sequence: Synthetic primer
acgttggatgccacttggaaagattcaagg

SEQ ID NO: 415 - DNA, 30 bp, Artificial Sequence
  Description of Artificial Sequence: Synthetic primer
acgttggatgcaacatagaccagaagtggg

SEQ ID NO: 416 - DNA, 30 bp, Artificial Sequence
  Description of Artificial Sequence: Synthetic primer
acgttggatgactggaccaaggtagatcac

SEQ ID NO: 417 - DNA, 31 bp, Artificial Sequence
  Description of Artificial Sequence: Synthetic primer
acgttggatgccacttttctgtggaaatatc

SEQ ID NO: 418 - DNA, 30 bp, Artificial Sequence
  Description of Artificial Sequence: Synthetic primer
acgttggatgaaacagtgcttttgaaggag

SEQ ID NO: 419 - DNA, 30 bp, Artificial Sequence
  Description of Artificial Sequence: Synthetic primer
acgttggatgcagctggatgactacaatgc

SEQ ID NO: 420 - DNA, 30 bp, Artificial Sequence
  Description of Artificial Sequence: Synthetic primer
acgttggatgctatgattttggattcagcg

SEQ ID NO: 421 - DNA, 30 bp, Artificial Sequence; identical to SEQ ID NO: 408
  Description of Artificial Sequence: Synthetic primer

SEQ ID NO: 422 - DNA, 30 bp, Artificial Sequence
  Description of Artificial Sequence: Synthetic primer
acgttggatgaccatagggaactagaaatc

SEQ ID NO: 423 - DNA, 30 bp, Artificial Sequence
  Description of Artificial Sequence: Synthetic primer
acgttggatgcagtgtctcttcctttccag

SEQ ID NO: 424 - DNA, 30 bp, Artificial Sequence
  Description of Artificial Sequence: Synthetic primer
acgttggatgtgggattcccctaaaggatg

SEQ ID NO: 425 - DNA, 30 bp, Artificial Sequence
  Description of Artificial Sequence: Synthetic primer
acgttggatgaaagagcaactgaaggaccc

SEQ ID NO: 426 - DNA, 30 bp, Artificial Sequence
  Description of Artificial Sequence: Synthetic primer
acgttggatgtaaattggaacatcaacagg

SEQ ID NO: 427 - DNA, 30 bp, Artificial Sequence
  Description of Artificial Sequence: Synthetic primer
acgttggatgcgtatcttcaagatgcacag

SEQ ID NO: 428 - DNA, 30 bp, Artificial Sequence
  Description of Artificial Sequence: Synthetic primer
acgttggatgactcgcataacagatgttcc

SEQ ID NO: 429 - DNA, 30 bp, Artificial Sequence
  Description of Artificial Sequence: Synthetic primer
acgttggatgacctgctgaaaaccaacacc

SEQ ID NO: 430 - DNA, 30 bp, Artificial Sequence
  Description of Artificial Sequence: Synthetic primer
acgttggatgcacttcacgtacttcactgg

SEQ ID NO: 431 - DNA, 30 bp, Artificial Sequence
  Description of Artificial Sequence: Synthetic primer
acgttggatgaggtccacagaagatgttag

SEQ ID NO: 432 - DNA, 30 bp, Artificial Sequence
  Description of Artificial Sequence: Synthetic primer
acgttggatgaagtcctgttgtctgcaagg

SEQ ID NO: 433 - DNA, 31 bp, Artificial Sequence
  Description of Artificial Sequence: Synthetic primer
acgttggatgcaaagaagaaagatgtagtgg

SEQ ID NO: 434 - DNA, 30 bp, Artificial Sequence
  Description of Artificial Sequence: Synthetic primer
acgttggatgtcctatcaccatcacactac

SEQ ID NO: 435 - DNA, 30 bp, Artificial Sequence
  Description of Artificial Sequence: Synthetic primer
acgttggatgtccttgcagactgatactcc

SEQ ID NO: 436 - DNA, 31 bp, Artificial Sequence
  Description of Artificial Sequence: Synthetic primer
acgttggatgcatatgtagtaggaatgaggg

SEQ ID NO: 437 - DNA, 30 bp, Artificial Sequence
  Description of Artificial Sequence: Synthetic primer
acgttggatgtctggtcaaccacatagatc

SEQ ID NO: 438 - DNA, 30 bp, Artificial Sequence
  Description of Artificial Sequence: Synthetic primer
acgttggatgtccacttgtacagaatggag

SEQ ID NO: 439 - DNA, 30 bp, Artificial Sequence
  Description of Artificial Sequence: Synthetic primer
acgttggatgccataccatttacttctgcc

SEQ ID NO: 440 - DNA, 31 bp, Artificial Sequence
  Description of Artificial Sequence: Synthetic primer
acgttggatgcacacacacattttaattgcc

SEQ ID NO: 441 - DNA, 30 bp, Artificial Sequence
  Description of Artificial Sequence: Synthetic primer
acgttggatgaaaggacttgagggtgattg

SEQ ID NO: 442 - DNA, 30 bp, Artificial Sequence
  Description of Artificial Sequence: Synthetic primer
acgttggatgagtcacagttcagtcccaac

SEQ ID NO: 443 - DNA, 30 bp, Artificial Sequence
  Description of Artificial Sequence: Synthetic primer
acgttggatgctttcgcacaaggctctatc

SEQ ID NO: 444 - DNA, 31 bp, Artificial Sequence
  Description of Artificial Sequence: Synthetic primer
acgttggatggatgtctctaagttgaaatgc

SEQ ID NO: 445 - DNA, 30 bp, Artificial Sequence
  Description of Artificial Sequence: Synthetic primer
acgttggatgcagaggctgaaggaacatac

SEQ ID NO: 446 - DNA, 30 bp, Artificial Sequence
  Description of Artificial Sequence: Synthetic primer
acgttggatgtcagcagggctctatctaag

SEQ ID NO: 447 - DNA, 30 bp, Artificial Sequence
  Description of Artificial Sequence: Synthetic primer
acgttggatgcctcaccattgtgtttaggc

SEQ ID NO: 448 - DNA, 30 bp, Artificial Sequence
  Description of Artificial Sequence: Synthetic primer
acgttggatggagaaaaatagactcggccc

SEQ ID NO: 449 - DNA, 30 bp, Artificial Sequence
  Description of Artificial Sequence: Synthetic primer
acgttggatgctgcttctccagtaatgttg

SEQ ID NO: 450 - DNA, 30 bp, Artificial Sequence
  Description of Artificial Sequence: Synthetic primer
acgttggatgccctccccagatatcattag

SEQ ID NO: 451 - DNA, 30 bp, Artificial Sequence
  Description of Artificial Sequence: Synthetic primer
acgttggatgaaatgcttcctactgcaatc

SEQ ID NO: 452 - DNA, 30 bp, Artificial Sequence
  Description of Artificial Sequence: Synthetic primer
acgttggatggacatcagatcagacagcac

SEQ ID NO: 453 - DNA, 31 bp, Artificial Sequence
  Description of Artificial Sequence: Synthetic primer
acgttggatggcccaggaaaaattaattcac

SEQ ID NO: 454 - DNA, 30 bp, Artificial Sequence
  Description of Artificial Sequence: Synthetic primer
acgttggatgtcacctcacttttgaagagc

SEQ ID NO: 455 - DNA, 30 bp, Artificial Sequence
  Description of Artificial Sequence: Synthetic primer
acgttggatggagggtaaaaatgacagcag

SEQ ID NO: 456 - DNA, 30 bp, Artificial Sequence
  Description of Artificial Sequence: Synthetic primer
acgttggatgtcttgaccttcctggttttc

SEQ ID NO: 457 - DNA, 30 bp, Artificial Sequence
  Description of Artificial Sequence: Synthetic primer
acgttggatgtagccagtggttaagaaagc

SEQ ID NO: 458 - DNA, 30 bp, Artificial Sequence
  Description of Artificial Sequence: Synthetic primer
acgttggatgatctgagtggtttcaggagg

SEQ ID NO: 459 - DNA, 30 bp, Artificial Sequence
  Description of Artificial Sequence: Synthetic primer
acgttggatgctggcgggtagtgtcttcat

SEQ ID NO: 460 - DNA, 30 bp, Artificial Sequence
  Description of Artificial Sequence: Synthetic primer
acgttggatgttctgggatttaaaggaggc

SEQ ID NO: 461 - DNA, 30 bp, Artificial Sequence
  Description of Artificial Sequence: Synthetic primer
acgttggatgaccttacactccagtgaatc

SEQ ID NO: 462 - DNA, 30 bp, Artificial Sequence
  Description of Artificial Sequence: Synthetic primer
acgttggatgcagtggagaagatgaaaccc

SEQ ID NO: 463 - DNA, 30 bp, Artificial Sequence
  Description of Artificial Sequence: Synthetic primer
acgttggatgcatggctgaggttacttagg

SEQ ID NO: 464 - DNA, 31 bp, Artificial Sequence
  Description of Artificial Sequence: Synthetic primer
acgttggatgctacaagtctaacagtcagag

SEQ ID NO: 465 - DNA, 30 bp, Artificial Sequence
  Description of Artificial Sequence: Synthetic primer
acgttggatggtgagtaccatcccttttgc

SEQ ID NO: 466 - DNA, 30 bp, Artificial Sequence
  Description of Artificial Sequence: Synthetic primer
acgttggatgaaacgaatgcttgagagcag

SEQ ID NO: 467 - DNA, 30 bp, Artificial Sequence
  Description of Artificial Sequence: Synthetic primer
acgttggatgttcacacgtagaccctgttg

SEQ ID NO: 468 - DNA, 29 bp, Artificial Sequence
  Description of Artificial Sequence: Synthetic primer
acgttggatggctgtctttgggattaaat

SEQ ID NO: 469 - DNA, 30 bp, Artificial Sequence
  Description of Artificial Sequence: Synthetic primer
acgttggatgtcccagaccttaagattccc

SEQ ID NO: 470 - DNA, 30 bp, Artificial Sequence
  Description of Artificial Sequence: Synthetic primer
acgttggatgcaagatccagatggtgaggg

SEQ ID NO: 471 - DNA, 31 bp, Artificial Sequence
  Description of Artificial Sequence: Synthetic primer
acgttggatggcttcctgagattatattgac

SEQ ID NO: 472 - DNA, 30 bp, Artificial Sequence
  Description of Artificial Sequence: Synthetic primer
acgttggatgtcatgacaaatcatgactag

SEQ ID NO: 473 - DNA, 30 bp, Artificial Sequence
  Description of Artificial Sequence: Synthetic primer
acgttggatgtcccaattcaggaaatggtg

SEQ ID NO: 474 - DNA, 30 bp, Artificial Sequence
  Description of Artificial Sequence: Synthetic primer
acgttggatgttcctcagcacacagcccca

SEQ ID NO: 475 - DNA, 30 bp, Artificial Sequence
  Description of Artificial Sequence: Synthetic primer
acgttggatgtataataaactgatagttgc

SEQ ID NO: 476 - DNA, 30 bp, Artificial Sequence; identical to SEQ ID NO: 438
  Description of Artificial Sequence: Synthetic primer

SEQ ID NO: 477 - DNA, 30 bp, Artificial Sequence
  Description of Artificial Sequence: Synthetic primer
acgttggatgactggccagtgtaggaattg

SEQ ID NO: 478 - DNA, 30 bp, Artificial Sequence
  Description of Artificial Sequence: Synthetic primer
acgttggatgcttccttcacctgaagatgg

SEQ ID NO: 479 - DNA, 30 bp, Artificial Sequence
  Description of Artificial Sequence: Synthetic primer
acgttggatgaaagcaacagacaaggcaag

SEQ ID NO: 480 - DNA, 30 bp, Artificial Sequence; identical to SEQ ID NO: 427
  Description of Artificial Sequence: Synthetic primer

SEQ ID NO: 481 - DNA, 30 bp, Artificial Sequence; identical to SEQ ID NO: 419
  Description of Artificial Sequence: Synthetic primer

SEQ ID NO: 482 - DNA, 30 bp, Artificial Sequence
  Description of Artificial Sequence: Synthetic primer
acgttggatgaactcccttcatccttcctc

SEQ ID NO: 483 - DNA, 30 bp, Artificial Sequence
  Description of Artificial Sequence: Synthetic primer
acgttggatggggttagcagcttaactttc

SEQ ID NO: 484 - DNA, 30 bp, Artificial Sequence
  Description of Artificial Sequence: Synthetic primer
acgttggatgtgcagacatgcactattctc

SEQ ID NO: 485 - DNA, 30 bp, Artificial Sequence
  Description of Artificial Sequence: Synthetic primer
acgttggatgtattgtgacttctgcagaac

SEQ ID NO: 486 - DNA, 30 bp, Artificial Sequence
  Description of Artificial Sequence: Synthetic primer
acgttggatgttcacatacggaaggccttg

SEQ ID NO: 487 - DNA, 30 bp, Artificial Sequence
  Description of Artificial Sequence: Synthetic primer
acgttggatgctcaggctaatctctctagg

SEQ ID NO: 488 - DNA, 30 bp, Artificial Sequence
  Description of Artificial Sequence: Synthetic primer
acgttggatgcaagttaatgagtttctccc

SEQ ID NO: 489 - DNA, 30 bp, Artificial Sequence
  Description of Artificial Sequence: Synthetic primer
acgttggatgctatctccaaagggtaacag

SEQ ID NO: 490 - DNA, 30 bp, Artificial Sequence; identical to SEQ ID NO: 410
  Description of Artificial Sequence: Synthetic primer

SEQ ID NO: 491 - DNA, 30 bp, Artificial Sequence
  Description of Artificial Sequence: Synthetic primer
acgttggatgacctcatggtattttgcatc

SEQ ID NO: 492 - DNA, 30 bp, Artificial Sequence; identical to SEQ ID NO: 479
  Description of Artificial Sequence: Synthetic primer

SEQ ID NO: 493 - DNA, 31 bp, Artificial Sequence
  Description of Artificial Sequence: Synthetic primer
acgttggatgctttaagatagattcccaggg

SEQ ID NO: 494 - DNA, 30 bp, Artificial Sequence
  Description of Artificial Sequence: Synthetic primer
acgttggatgcaaatttccacgagcctgag

SEQ ID NO: 495 - DNA, 30 bp, Artificial Sequence
  Description of Artificial Sequence: Synthetic primer
acgttggatgaagatcagcagcaccaaagg

SEQ ID NO: 496 - DNA, 30 bp, Artificial Sequence; identical to SEQ ID NO: 426
  Description of Artificial Sequence: Synthetic primer

SEQ ID NO: 497 - DNA, 30 bp, Artificial Sequence; identical to SEQ ID NO: 425
  Description of Artificial Sequence: Synthetic primer

SEQ ID NO: 498 - DNA, 30 bp, Artificial Sequence
  Description of Artificial Sequence: Synthetic primer
acgttggatgagactggaaatgcgcaatgg

SEQ ID NO: 499 - DNA, 30 bp, Artificial Sequence
  Description of Artificial Sequence: Synthetic primer
acgttggatgtaaccattgcgcatttccag

SEQ ID NO: 500 - DNA, 29 bp, Artificial Sequence
  Description of Artificial Sequence: Synthetic primer
acgttggatgggagaggagaaccctggac

SEQ ID NO: 501 - DNA, 30 bp, Artificial Sequence
  Description of Artificial Sequence: Synthetic primer
acgttggatgagtttgctcctatgtggctc

SEQ ID NO: 502 - DNA, 30 bp, Artificial Sequence
  Description of Artificial Sequence: Synthetic primer
acgttggatgcacaacggtcatttgaacac

SEQ ID NO: 503 - DNA, 30 bp, Artificial Sequence
  Description of Artificial Sequence: Synthetic primer
acgttggatgcagttgtcttagcacacagg

SEQ ID NO: 504 - DNA, 30 bp, Artificial Sequence
  Description of Artificial Sequence: Synthetic primer
acgttggatgcgaaatctggtcctatgaag

SEQ ID NO: 505 - DNA, 30 bp, Artificial Sequence
  Description of Artificial Sequence: Synthetic primer
acgttggatgcagcatcaaacagaataggc

SEQ ID NO: 506 - DNA, 30 bp, Artificial Sequence
  Description of Artificial Sequence: Synthetic primer
acgttggatgtcactcactccttgctaagc

SEQ ID NO: 507 - DNA, 30 bp, Artificial Sequence
  Description of Artificial Sequence: Synthetic primer
acgttggatgtgaggctcaaagggattagg

SEQ ID NO: 508 - DNA, 30 bp, Artificial Sequence
  Description of Artificial Sequence: Synthetic primer
acgttggatgtgttctactgcagctccaag

SEQ ID NO: 509 - DNA, 30 bp, Artificial Sequence
  Description of Artificial Sequence: Synthetic primer
acgttggatgcatttactcagtgccaggtc

SEQ ID NO: 510 - DNA, 30 bp, Artificial Sequence
  Description of Artificial Sequence: Synthetic primer
acgttggatgaggcaagtacacatacaatg

SEQ ID NO: 511 - DNA, 30 bp, Artificial Sequence
  Description of Artificial Sequence: Synthetic primer
acgttggatgttgttcagaattacatgatg

SEQ ID NO: 512 - DNA, 30 bp, Artificial Sequence
  Description of Artificial Sequence: Synthetic primer
acgttggatggcaacaaacagtgttccagc

SEQ ID NO: 513 - DNA, 30 bp, Artificial Sequence
  Description of Artificial Sequence: Synthetic primer
acgttggatggggcaattttctagtccagc

SEQ ID NO: 514 - DNA, 30 bp, Artificial Sequence
  Description of Artificial Sequence: Synthetic primer
acgttggatgaagtctgtgtttaagccccc

SEQ ID NO: 515 - DNA, 30 bp, Artificial Sequence
  Description of Artificial Sequence: Synthetic primer
acgttggatgatatcaatcaccctcaagtc

SEQ ID NO: 516 - DNA, 30 bp, Artificial Sequence
  Description of Artificial Sequence: Synthetic primer
acgttggatgtctgtaatcccaggacccta

SEQ ID NO: 517 - DNA, 30 bp, Artificial Sequence
  Description of Artificial Sequence: Synthetic primer
acgttggatgccaagcagtattgctaatgg

SEQ ID NO: 518 - DNA, 30 bp, Artificial Sequence
  Description of Artificial Sequence: Synthetic primer
acgttggatgtgactatttccgcttggctc

SEQ ID NO: 519 - DNA, 30 bp, Artificial Sequence
  Description of Artificial Sequence: Synthetic primer
acgttggatgcacagacgcaggatttggat

SEQ ID NO: 520 - DNA, 30 bp, Artificial Sequence
  Description of Artificial Sequence: Synthetic primer
acgttggatggtgttagtaacactgatgcc

SEQ ID NO: 521 - DNA, 30 bp, Artificial Sequence
  Description of Artificial Sequence: Synthetic primer
acgttggatgcatatccacagcctaatcac

SEQ ID NO: 522 - DNA, 30 bp, Artificial Sequence
  Description of Artificial Sequence: Synthetic primer
acgttggatgtggagagttgtggttgatgg

SEQ ID NO: 523 - DNA, 30 bp, Artificial Sequence
  Description of Artificial Sequence: Synthetic primer
acgttggatgactttctggcattgactggg

SEQ ID NO: 524 - DNA, 30 bp, Artificial Sequence
  Description of Artificial Sequence: Synthetic primer
acgttggatggcagtacggattagcatgag

SEQ ID NO: 525 - DNA, 30 bp, Artificial Sequence
  Description of Artificial Sequence: Synthetic primer
acgttggatgtctggttaggcttcagttag

SEQ ID NO: 526 - DNA, 30 bp, Artificial Sequence
  Description of Artificial Sequence: Synthetic primer
acgttggatgttttgcttggtgtttagcag

SEQ ID NO: 527 - DNA, 30 bp, Artificial Sequence
  Description of Artificial Sequence: Synthetic primer
acgttggatgtatcagagctagaagaaacc

SEQ ID NO: 528 - DNA, 30 bp, Artificial Sequence
  Description of Artificial Sequence: Synthetic primer
acgttggatgttctcatgttggggagacac

SEQ ID NO: 529 - DNA, 30 bp, Artificial Sequence
  Description of Artificial Sequence: Synthetic primer
acgttggatgacctgttggaacacatgaag

SEQ ID NO: 530 - DNA, 30 bp, Artificial Sequence
  Description of Artificial Sequence: Synthetic primer
acgttggatgctttgaaattgttcttgtcc

SEQ ID NO: 531 - DNA, 30 bp, Artificial Sequence
  Description of Artificial Sequence: Synthetic primer
acgttggatgccaaacatttcttgttggac

SEQ ID NO: 532 - DNA, 30 bp, Artificial Sequence
  Description of Artificial Sequence: Synthetic primer
acgttggatggccgttaagcaactacaagc

SEQ ID NO: 533 - DNA, 30 bp, Artificial Sequence
  Description of Artificial Sequence: Synthetic primer
acgttggatgcccacttctggtctatgttg

SEQ ID NO: 534 - DNA, 30 bp, Artificial Sequence
  Description of Artificial Sequence: Synthetic primer
acgttggatggaatgcgtcagggatttatg

SEQ ID NO: 535 - DNA, 30 bp, Artificial Sequence
  Description of Artificial Sequence: Synthetic primer
acgttggatgttacagagcaaggtctgagg

SEQ ID NO: 536 - DNA, 30 bp, Artificial Sequence
  Description of Artificial Sequence: Synthetic primer
acgttggatgctgttaaactgcctcagacc

SEQ ID NO: 537 - DNA, 30 bp, Artificial Sequence
  Description of Artificial Sequence: Synthetic primer
acgttggatggtcctgatttatgagctccc

SEQ ID NO: 538 - DNA, 30 bp, Artificial Sequence
  Description of Artificial Sequence: Synthetic primer
acgttggatgtcaggagttgagcaagctag

SEQ ID NO: 539 - DNA, 30 bp, Artificial Sequence
  Description of Artificial Sequence: Synthetic primer
acgttggatgttcataaagaagtggagagc

SEQ ID NO: 540 - DNA, 30 bp, Artificial Sequence
  Description of Artificial Sequence: Synthetic primer
acgttggatgtattaggctctttggccgac

SEQ ID NO: 541 - DNA, 30 bp, Artificial Sequence
  Description of Artificial Sequence: Synthetic primer
acgttggatgcaaggtcagagtgtcactgg

SEQ ID NO: 542 - DNA, 30 bp, Artificial Sequence
  Description of Artificial Sequence: Synthetic primer
acgttggatgctccattccaaattcctttc

SEQ ID NO: 543 - DNA, 30 bp, Artificial Sequence
  Description of Artificial Sequence: Synthetic primer
acgttggatgtcagatacaagtgaaggtag

SEQ ID NO: 544 - DNA, 30 bp, Artificial Sequence
  Description of Artificial Sequence: Synthetic primer
acgttggatgtgcttggtataccatgcctg

SEQ ID NO: 545 - DNA, 30 bp, Artificial Sequence
  Description of Artificial Sequence: Synthetic primer
acgttggatgatgaaccttacacaggccag

SEQ ID NO: 546 - DNA, 30 bp, Artificial Sequence
  Description of Artificial Sequence: Synthetic primer
acgttggatgctctgtacttaggacacacg

SEQ ID NO: 547 - DNA, 30 bp, Artificial Sequence
  Description of Artificial Sequence: Synthetic primer
acgttggatgtcccacactcaaaactttgc

SEQ ID NO: 548 - DNA, 19 bp, Artificial Sequence
  Description of Artificial Sequence: Synthetic primer
attgcttacgcaacaccac

SEQ ID NO: 549 - DNA, 18 bp, Artificial Sequence
  Description of Artificial Sequence: Synthetic primer
agatggagagaatgccac

SEQ ID NO: 550 - DNA, 19 bp, Artificial Sequence
  Description of Artificial Sequence: Synthetic primer
gcaagtgggcattcgacca

SEQ ID NO: 551 - DNA, 21 bp, Artificial Sequence
  Description of Artificial Sequence: Synthetic primer
cttcaagatgcacagggccac

SEQ ID NO: 552 - DNA, 20 bp, Artificial Sequence
  Description of Artificial Sequence: Synthetic primer
cacttgaccaggcccttaac

SEQ ID NO: 553 - DNA, 18 bp, Artificial Sequence
  Description of Artificial Sequence: Synthetic primer
ggcccgcctgcatctgtg

SEQ ID NO: 554 - DNA, 17 bp, Artificial Sequence
  Description of Artificial Sequence: Synthetic primer
ctttctctctttccagg

SEQ ID NO: 555 - DNA, 17 bp, Artificial Sequence
  Description of Artificial Sequence: Synthetic primer
ctttaatcccccacact

SEQ ID NO: 556 - DNA, 24 bp, Artificial Sequence
  Description of Artificial Sequence: Synthetic primer
agaacatatatgttgcattttttt

SEQ ID NO: 557 - DNA, 17 bp, Artificial Sequence
  Description of Artificial Sequence: Synthetic primer
gaaggccttgcctgtta

SEQ ID NO: 558 - DNA, 20 bp, Artificial Sequence
  Description of Artificial Sequence: Synthetic primer
aggaagagaatctgatagcc

SEQ ID NO: 559 - DNA, 17 bp, Artificial Sequence
  Description of Artificial Sequence: Synthetic primer
agtttctcccacttacc

SEQ ID NO: 560 - DNA, 21 bp, Artificial Sequence
  Description of Artificial Sequence: Synthetic primer
agggtaacagaatgattaaaa

SEQ ID NO: 561 - DNA, 17 bp, Artificial Sequence
  Description of Artificial Sequence: Synthetic primer
ttcggcatccctgacat

SEQ ID NO: 562 - DNA, 19 bp, Artificial Sequence
  Description of Artificial Sequence: Synthetic primer
cgtatcttcaagatgcaca

SEQ ID NO: 563 - DNA, 19 bp, Artificial Sequence
  Description of Artificial Sequence: Synthetic primer
gcaagtgggcattcgacca

SEQ ID NO: 564 - DNA, 21 bp, Artificial Sequence
  Description of Artificial Sequence: Synthetic primer
gggcagaattactgaatcaag

SEQ ID NO: 565 - DNA, 19 bp, Artificial Sequence
  Description of Artificial Sequence: Synthetic primer
cagcagactctgatgtggc

SEQ ID NO: 566 - DNA, 17 bp, Artificial Sequence
  Description of Artificial Sequence: Synthetic primer
gggagcatcttttgagc

SEQ ID NO: 567 - DNA, 20 bp, Artificial Sequence
  Description of Artificial Sequence: Synthetic primer
caacaggaaaaatacatcca

SEQ ID NO: 568 - DNA, 19 bp, Artificial Sequence
  Description of Artificial Sequence: Synthetic primer
caaccctaggaaaacattt

SEQ ID NO: 569 - DNA, 21 bp, Artificial Sequence
  Description of Artificial Sequence: Synthetic primer
ttctatgattttggattcagc

SEQ ID NO: 570 - DNA, 21 bp, Artificial Sequence
  Description of Artificial Sequence: Synthetic primer
acatactctgaggagagaaag

SEQ ID NO: 571 - DNA, 17 bp, Artificial Sequence
  Description of Artificial Sequence: Synthetic primer
gaaccctggacaagaat

SEQ ID NO: 572 - DNA, 20 bp, Artificial Sequence
  Description of Artificial Sequence: Synthetic primer
atgtggctcaaacatccgaa

SEQ ID NO: 573 - DNA, 24 bp, Artificial Sequence
  Description of Artificial Sequence: Synthetic primer
tttgaacactacagtttctgttat

SEQ ID NO: 574 - DNA, 23 bp, Artificial Sequence
  Description of Artificial Sequence: Synthetic primer
aaacaatccatttaacataccta

SEQ ID NO: 575 - DNA, 17 bp, Artificial Sequence
  Description of Artificial Sequence: Synthetic primer
gcaaatgaattctggga

SEQ ID NO: 576 - DNA, 19 bp, Artificial Sequence
  Description of Artificial Sequence: Synthetic primer
tgaaagtctttgaggtgtt

SEQ ID NO: 577 - DNA, 20 bp, Artificial Sequence
  Description of Artificial Sequence: Synthetic primer
cctggcaatgatcaaccccc

SEQ ID NO: 578 - DNA, 24 bp, Artificial Sequence
  Description of Artificial Sequence: Synthetic primer
ctaaatattagcagactgaaatac

SEQ ID NO: 579 - DNA, 19 bp, Artificial Sequence
  Description of Artificial Sequence: Synthetic primer
gctggcataaatgaaattg

SEQ ID NO: 580 - DNA, 17 bp, Artificial Sequence
  Description of Artificial Sequence: Synthetic primer
gtgccaggtcccacact

SEQ ID NO: 581 - DNA, 23 bp, Artificial Sequence
  Description of Artificial Sequence: Synthetic primer
gtacacatacaatgattttactc

SEQ ID NO: 582 - DNA, 24 bp, Artificial Sequence
  Description of Artificial Sequence: Synthetic primer
ttacatgatgaatattatggaagt

SEQ ID NO: 583 - DNA, 21 bp, Artificial Sequence
  Description of Artificial Sequence: Synthetic primer
ttccagcatgattctaagaca

SEQ ID NO: 584 - DNA, 23 bp, Artificial Sequence
  Description of Artificial Sequence: Synthetic primer
caacttgagatacagtaaaaatt

SEQ ID NO: 585 - DNA, 22 bp, Artificial Sequence
  Description of Artificial Sequence: Synthetic primer
tgaaatgaattctccaatagac

SEQ ID NO: 586 - DNA, 17 bp, Artificial Sequence
  Description of Artificial Sequence: Synthetic primer
accctcaagtccttttg

SEQ ID NO: 587 - DNA, 20 bp, Artificial Sequence
  Description of Artificial Sequence: Synthetic primer
tcccaggaccctaaaaaagt

SEQ ID NO: 588 - DNA, 21 bp, Artificial Sequence
  Description of Artificial Sequence: Synthetic primer
cagtattgctaatgggtgttc

SEQ ID NO: 589 - DNA, 22 bp, Artificial Sequence
  Description of Artificial Sequence: Synthetic primer
tgtctctagggcactacatatc

SEQ ID NO: 590 - DNA, 18 bp, Artificial Sequence
  Description of Artificial Sequence: Synthetic primer
gaaataatgcttcagggg

SEQ ID NO: 591 - DNA, 24 bp, Artificial Sequence
  Description of Artificial Sequence: Synthetic primer
atgccttctaatgcattcatttta

SEQ ID NO: 592 - DNA, 21 bp, Artificial Sequence
  Description of Artificial Sequence: Synthetic primer
cctaatcacataaaccaggaa

SEQ ID NO: 593 - DNA, 18 bp, Artificial Sequence
  Description of Artificial Sequence: Synthetic primer
gaaaacaagagagggaag

SEQ ID NO: 594 - DNA, 20 bp, Artificial Sequence
  Description of Artificial Sequence: Synthetic primer
tgtgactcctcatgctaatc

SEQ ID NO: 595 - DNA, 17 bp, Artificial Sequence
  Description of Artificial Sequence: Synthetic primer
ccagtcaatgccagaaa

SEQ ID NO: 596 - DNA, 20 bp, Artificial Sequence
  Description of Artificial Sequence: Synthetic primer
cagttagactgaaacgcaca

SEQ ID NO: 597 - DNA, 20 bp, Artificial Sequence
  Description of Artificial Sequence: Synthetic primer
tgtgtcatttaaatccttca

SEQ ID NO: 598 - DNA, 21 bp, Artificial Sequence
  Description of Artificial Sequence: Synthetic primer
gagctagaagaaacctgaaag

SEQ ID NO: 599 - DNA, 18 bp, Artificial Sequence
  Description of Artificial Sequence: Synthetic primer
gttggtgtccaaatggca

SEQ ID NO: 600 - DNA, 17 bp, Artificial Sequence
  Description of Artificial Sequence: Synthetic primer
acatgaagacactaccc

SEQ ID NO: 601 - DNA, 21 bp, Artificial Sequence
  Description of Artificial Sequence: Synthetic primer
tgttcttgtccaaaattacct

SEQ ID NO: 602 - DNA, 24 bp, Artificial Sequence
  Description of Artificial Sequence: Synthetic primer
gacatttaggttatttccaaattt

SEQ ID NO: 603 - DNA, 19 bp, Artificial Sequence
  Description of Artificial Sequence: Synthetic primer
catcagagagaattgaagt

SEQ ID NO: 604 - DNA, 17 bp, Artificial Sequence
  Description of Artificial Sequence: Synthetic primer
ggaattcaggcatacac

SEQ ID NO: 605 - DNA, 21 bp, Artificial Sequence
  Description of Artificial Sequence: Synthetic primer
agaaatagatggagccaaaag

SEQ ID NO: 606 - DNA, 17 bp, Artificial Sequence
  Description of Artificial Sequence: Synthetic primer
ggatgggactgaaactc

SEQ ID NO: 607 - DNA, 24 bp, Artificial Sequence
  Description of Artificial Sequence: Synthetic primer
ctctgtaatttttcatgtatgata

SEQ ID NO: 608 - DNA, 17 bp, Artificial Sequence
  Description of Artificial Sequence: Synthetic primer
atgagctcccttcactc

SEQ ID NO: 609 - DNA, 18 bp, Artificial Sequence
  Description of Artificial Sequence: Synthetic primer
tgagcaagctagagagta

SEQ ID NO: 610 - DNA, 19 bp, Artificial Sequence
  Description of Artificial Sequence: Synthetic primer
aagtggagagcatttacat

SEQ ID NO: 611 - DNA, 17 bp, Artificial Sequence
  Description of Artificial Sequence: Synthetic primer
tttggccgactgaaatg

SEQ ID NO: 612 - DNA, 23 bp, Artificial Sequence
  Description of Artificial Sequence: Synthetic primer
ggtcagagtgtcactgggctaca

SEQ ID NO: 613 - DNA, 18 bp, Artificial Sequence
  Description of Artificial Sequence: Synthetic primer
tcccaaatttccttttca

SEQ ID NO: 614 - DNA, 20 bp, Artificial Sequence
  Description of Artificial Sequence: Synthetic primer
acaagtgaaggtagtattgt

SEQ ID NO: 615 - DNA, 18 bp, Artificial Sequence
  Description of Artificial Sequence: Synthetic primer
gcctggcatctgctaatc

SEQ ID NO: 616 - DNA, 17 bp, Artificial Sequence
  Description of Artificial Sequence: Synthetic primer
gcaaaggcagagactat

SEQ ID NO: 617 - DNA, 19 bp, Artificial Sequence
  Description of Artificial Sequence: Synthetic primer
acacacgatgtttctccag

SEQ ID NO: 618 - DNA, 20 bp, Artificial Sequence
  Description of Artificial Sequence: Synthetic primer
acagttttatgagacaggta

SEQ ID NO: 619 - DNA, 30 bp, Artificial Sequence
  Description of Artificial Sequence: Synthetic primer
acgttggatggacatgaaataggcacgtgg

SEQ ID NO: 620 - DNA, 30 bp, Artificial Sequence
  Description of Artificial Sequence: Synthetic primer
acgttggatgtcactctgtttctactaacc

SEQ ID NO: 621 - DNA, 30 bp, Artificial Sequence
  Description of Artificial Sequence: Synthetic primer
acgttggatgagaaagtgaggaagagaggg

SEQ ID NO: 622 - DNA, 30 bp, Artificial Sequence
  Description of Artificial Sequence: Synthetic primer
acgttggatgatcgatccaatgttgactgc

SEQ ID NO: 623 - DNA, 17 bp, Artificial Sequence
  Description of Artificial Sequence: Synthetic primer
agagaggggccttgagc

SEQ ID NO: 624 - DNA, 19 bp, Artificial Sequence
  Description of Artificial Sequence: Synthetic primer
aatgttgactgcattgact

SEQ ID NO: 625 - DNA, 30 bp, Artificial Sequence
  Description of Artificial Sequence: Synthetic primer
acgttggatgtatcacaagaacagcatggg

SEQ ID NO: 626 - DNA, 30 bp, Artificial Sequence
  Description of Artificial Sequence: Synthetic primer
acgttggatgaagaggagtggctgataatg

SEQ ID NO: 627 - DNA, 30 bp, Artificial Sequence
  Description of Artificial Sequence: Synthetic primer
acgttggatgggcaggtcatggatttattg

SEQ ID NO: 628 - DNA, 30 bp, Artificial Sequence
  Description of Artificial Sequence: Synthetic primer
acgttggatggtgaagagctctgaaatgcc

SEQ ID NO: 629 - DNA, 30 bp, Artificial Sequence
  Description of Artificial Sequence: Synthetic primer
acgttggatgaaggtggagcctgcctcaag

SEQ ID NO: 630 - DNA, 30 bp, Artificial Sequence; identical to SEQ ID NO: 629
  Description of Artificial Sequence: Synthetic primer

SEQ ID NO: 631 - DNA, 30 bp, Artificial Sequence
  Description of Artificial Sequence: Synthetic primer
acgttggatgtcaagcgatcctcttcagcc

SEQ ID NO: 632 - DNA, 30 bp, Artificial Sequence
  Description of Artificial Sequence: Synthetic primer
acgttggatggtgggttacttggtccatac

SEQ ID NO: 633 - DNA, 31 bp, Artificial Sequence
  Description of Artificial Sequence: Synthetic primer
acgttggatggtatgaagttctttgcagagt

SEQ ID NO: 634 - DNA, 30 bp, Artificial Sequence
  Description of Artificial Sequence: Synthetic primer
acgttggatgccattcttttaccttgaacc

SEQ ID NO: 635 - DNA, 30 bp, Artificial Sequence
  Description of Artificial Sequence: Synthetic primer
acgttggatgatagctgatggtgtgctgag

SEQ ID NO: 636 - DNA, 30 bp, Artificial Sequence
  Description of Artificial Sequence: Synthetic primer
acgttggatgcaaacaatcccattacacag

SEQ ID NO: 637 - DNA, 31 bp, Artificial Sequence
  Description of Artificial Sequence: Synthetic primer
acgttggatgccatatcacatggatatgagg

SEQ ID NO: 638 - DNA, 31 bp, Artificial Sequence
  Description of Artificial Sequence: Synthetic primer
acgttggatggctgcatataagagacacatg

SEQ ID NO: 639 - DNA, 30 bp, Artificial Sequence
  Description of Artificial Sequence: Synthetic primer
acgttggatgtgagaggaagcctggtgttg

SEQ ID NO: 640 - DNA, 30 bp, Artificial Sequence
  Description of Artificial Sequence: Synthetic primer
acgttggatgtatgtctcctgccttcttcc

SEQ ID NO: 641 - DNA, 30 bp, Artificial Sequence
  Description of Artificial Sequence: Synthetic primer
acgttggatgggtaaacaactgacccatcc

SEQ ID NO: 642 - DNA, 30 bp, Artificial Sequence
  Description of Artificial Sequence: Synthetic primer
acgttggatgaattcacagctaagcctccc

SEQ ID NO: 643 - DNA, 31 bp, Artificial Sequence
  Description of Artificial Sequence: Synthetic primer
acgttggatggtagaagtttagtatatgatg

SEQ ID NO: 644 - DNA, 30 bp, Artificial Sequence
  Description of Artificial Sequence: Synthetic primer
acgttggatgcttgtgccaatcccacaatg

SEQ ID NO: 645 - DNA, 30 bp, Artificial Sequence; identical to SEQ ID NO: 644
  Description of Artificial Sequence: Synthetic primer

SEQ ID NO: 646 - DNA, 30 bp, Artificial Sequence
  Description of Artificial Sequence: Synthetic primer
acgttggatgtaactctgagacccaaggac

SEQ ID NO: 647 - DNA, 30 bp, Artificial Sequence
  Description of Artificial Sequence: Synthetic primer
acgttggatgggattaccctaaggatccac

SEQ ID NO: 648 - DNA, 30 bp, Artificial Sequence
  Description of Artificial Sequence: Synthetic primer
acgttggatgttgagtccaagaggttgagg

SEQ ID NO: 649 - DNA, 30 bp, Artificial Sequence
  Description of Artificial Sequence: Synthetic primer
acgttggatgtacttgggagactgaggtag

SEQ ID NO: 650 - DNA, 30 bp, Artificial Sequence
  Description of Artificial Sequence: Synthetic primer
acgttggatgagaatggtctttcccactcc

SEQ ID NO: 651 - DNA, 30 bp, Artificial Sequence
  Description of Artificial Sequence: Synthetic primer
acgttggatgtactgagactcccagcattg

SEQ ID NO: 652 - DNA, 30 bp, Artificial Sequence
  Description of Artificial Sequence: Synthetic primer
acgttggatgtcatgtgattctcctgcctc

SEQ ID NO: 653 - DNA, 30 bp, Artificial Sequence
  Description of Artificial Sequence: Synthetic primer
acgttggatgagaatgacttgggttttggg

SEQ ID NO: 654 - DNA, 30 bp, Artificial Sequence
  Description of Artificial Sequence: Synthetic primer
acgttggatggtctttctcaatcccagcac

SEQ ID NO: 655 - DNA, 30 bp, Artificial Sequence
  Description of Artificial Sequence: Synthetic primer
acgttggatgaagacctcaggatgtgatgc

SEQ ID NO: 656 - DNA, 30 bp, Artificial Sequence
  Description of Artificial Sequence: Synthetic primer
acgttggatgagttcgtcagagagatgtcc

SEQ ID NO: 657 - DNA, 30 bp, Artificial Sequence
  Description of Artificial Sequence: Synthetic primer
acgttggatggacatcagaagctaattggg

SEQ ID NO: 658 - DNA, 30 bp, Artificial Sequence
  Description of Artificial Sequence: Synthetic primer
acgttggatgtttgttatgcagaggtggcc

SEQ ID NO: 659 - DNA, 30 bp, Artificial Sequence
  Description of Artificial Sequence: Synthetic primer
acgttggatgaactgagcttcagacttccc

SEQ ID NO: 660 - DNA, 30 bp, Artificial Sequence
  Description of Artificial Sequence: Synthetic primer
acgttggatggccatcaagtttgtggcaat

SEQ ID NO: 661 - DNA, 30 bp, Artificial Sequence
  Description of Artificial Sequence: Synthetic primer
acgttggatgatggtttctgtaatcccccc

SEQ ID NO: 662 - DNA, 30 bp, Artificial Sequence
  Description of Artificial Sequence: Synthetic primer
acgttggatgaagcagaaaactttgtgccg

SEQ ID NO: 663 - DNA, 30 bp, Artificial Sequence
  Description of Artificial Sequence: Synthetic primer
acgttggatgcatcattcctctgtgaggcg

SEQ ID NO: 664 - DNA, 30 bp, Artificial Sequence
  Description of Artificial Sequence: Synthetic primer
acgttggatgtaactcctgtgtggctttct

SEQ ID NO: 665 - DNA, 30 bp, Artificial Sequence
  Description of Artificial Sequence: Synthetic primer
acgttggatgagctttgcaccctgtgatgc

SEQ ID NO: 666 - DNA, 30 bp, Artificial Sequence; identical to SEQ ID NO: 665
  Description of Artificial Sequence: Synthetic primer

SEQ ID NO: 667 - DNA, 30 bp, Artificial Sequence
  Description of Artificial Sequence: Synthetic primer
acgttggatgattcattccaagaccgggtg

SEQ ID NO: 668 - DNA, 30 bp, Artificial Sequence
  Description of Artificial Sequence: Synthetic primer
acgttggatgacagagcaagaccttctctc

SEQ ID NO: 669 - DNA, 30 bp, Artificial Sequence
  Description of Artificial Sequence: Synthetic primer
acgttggatgtactactgcactccagcctg

SEQ ID NO: 670 - DNA, 30 bp, Artificial Sequence
  Description of Artificial Sequence: Synthetic primer
acgttggatgcagagacttgcagaatggac

SEQ ID NO: 671 - DNA, 30 bp, Artificial Sequence
  Description of Artificial Sequence: Synthetic primer
acgttggatgaagcttgcctcccaagttag

SEQ ID NO: 672 - DNA, 31 bp, Artificial Sequence
  Description of Artificial Sequence: Synthetic primer
acgttggatgcagtacaacagggtggctatc

SEQ ID NO: 673 - DNA, 30 bp, Artificial Sequence
  Description of Artificial Sequence: Synthetic primer
acgttggatgcatggcttctcttacacctg

SEQ ID NO: 674 - DNA, 30 bp, Artificial Sequence
  Description of Artificial Sequence: Synthetic primer
acgttggatggccactccagctttcttttg

SEQ ID NO: 675 - DNA, 30 bp, Artificial Sequence; identical to SEQ ID NO: 671
  Description of Artificial Sequence: Synthetic primer

SEQ ID NO: 676 - DNA, 30 bp, Artificial Sequence
  Description of Artificial Sequence: Synthetic primer
acgttggatgggaaagaagcttgatgtggc

SEQ ID NO: 677 - DNA, 30 bp, Artificial Sequence
  Description of Artificial Sequence: Synthetic primer
acgttggatgcctgggaaataaccatgagc

SEQ ID NO: 678 - DNA, 30 bp, Artificial Sequence
  Description of Artificial Sequence: Synthetic primer
acgttggatgttcagctccagctgcatgtt

SEQ ID NO: 679 - DNA, 30 bp, Artificial Sequence
  Description of Artificial Sequence: Synthetic primer
acgttggatgccctgtcatttcaaataccg

SEQ ID NO: 680 - DNA, 30 bp, Artificial Sequence
  Description of Artificial Sequence: Synthetic primer
acgttggatggcagaagtctagccaagaac

SEQ ID NO: 681 - DNA, 30 bp, Artificial Sequence
  Description of Artificial Sequence: Synthetic primer
acgttggatgaatgcagaagtctagccaag

SEQ ID NO: 682 - DNA, 30 bp, Artificial Sequence
  Description of Artificial Sequence: Synthetic primer
acgttggatgccagacagttgtgtgttgac

SEQ ID NO: 683 - DNA, 30 bp, Artificial Sequence
  Description of Artificial Sequence: Synthetic primer
acgttggatgagaggaattcagttgctgcc

SEQ ID NO: 684 - DNA, 30 bp, Artificial Sequence
  Description of Artificial Sequence: Synthetic primer
acgttggatgagacagtcttgctctgtcac

SEQ ID NO: 685 - DNA, 30 bp, Artificial Sequence
  Description of Artificial Sequence: Synthetic primer
acgttggatggcatagtggtgtgatcatgg

SEQ ID NO: 686 - DNA, 30 bp, Artificial Sequence
  Description of Artificial Sequence: Synthetic primer
acgttggatgatggattacggaaggaatac

SEQ ID NO: 687 - DNA, 30 bp, Artificial Sequence
  Description of Artificial Sequence: Synthetic primer
acgttggatggtgtgcagcttagtaagtgc

SEQ ID NO: 688 - DNA, 30 bp, Artificial Sequence
  Description of Artificial Sequence: Synthetic primer
acgttggatggtgaaaccccgtctctacta

SEQ ID NO: 689 - DNA, 30 bp, Artificial Sequence
  Description of Artificial Sequence: Synthetic primer
acgttggatgcagtgagttgtgacagcacc

SEQ ID NO: 690 - DNA, 30 bp, Artificial Sequence
  Description of Artificial Sequence: Synthetic primer
acgttggatgacgagatctccttgtgttgc

SEQ ID NO: 691 - DNA, 30 bp, Artificial Sequence
  Description of Artificial Sequence: Synthetic primer
acgttggatgatgaccccgtttctttgcac

SEQ ID NO: 692 - DNA, 30 bp, Artificial Sequence
  Description of Artificial Sequence: Synthetic primer
acgttggatggagcacatggattcacagag

SEQ ID NO: 693 - DNA, 30 bp, Artificial Sequence
  Description of Artificial Sequence: Synthetic primer
acgttggatgcttcttaatggtagggccag

SEQ ID NO: 694 - DNA, 30 bp, Artificial Sequence
  Description of Artificial Sequence: Synthetic primer
acgttggatgtagatgggctcttcttggac

SEQ ID NO: 695 - DNA, 30 bp, Artificial Sequence
  Description of Artificial Sequence: Synthetic primer
acgttggatgtcagacctgtagatgggctc

SEQ ID NO: 696 - DNA, 30 bp, Artificial Sequence
  Description of Artificial Sequence: Synthetic primer
acgttggatgaagctatatggagcccaagg

SEQ ID NO: 697 - DNA, 18 bp, Artificial Sequence
  Description of Artificial Sequence: Synthetic primer
gggaccaggtggagataa

SEQ ID NO: 698 - DNA, 22 bp, Artificial Sequence
  Description of Artificial Sequence: Synthetic primer
agaaaactttgtgccgttttct

SEQ ID NO: 699 - DNA, 17 bp, Artificial Sequence
  Description of Artificial Sequence: Synthetic primer
ccaggcagcaactccct

SEQ ID NO: 700 - DNA, 21 bp, Artificial Sequence
  Description of Artificial Sequence: Synthetic primer
ctccaagcagtaaagatgttc

SEQ ID NO: 701 - DNA, 21 bp, Artificial Sequence
  Description of Artificial Sequence: Synthetic primer
ttggttttagaggattgctcc

SEQ ID NO: 702 - DNA, 19 bp, Artificial Sequence
  Description of Artificial Sequence: Synthetic primer
ggttttagaggattgctcc

SEQ ID NO: 703 - DNA, 20 bp, Artificial Sequence
  Description of Artificial Sequence: Synthetic primer
tcatgcctataatccaagca

SEQ ID NO: 704 - DNA, 20 bp, Artificial Sequence
  Description of Artificial Sequence: Synthetic primer
aaaagcaagaaacaacagca

SEQ ID NO: 705 - DNA, 17 bp, Artificial Sequence
  Description of Artificial Sequence: Synthetic primer
agacagggtgagacctc

SEQ ID NO: 706 - DNA, 23 bp, Artificial Sequence
  Description of Artificial Sequence: Synthetic primer
tatgctgcatataagagacacat

SEQ ID NO: 707 - DNA, 18 bp, Artificial Sequence
  Description of Artificial Sequence: Synthetic primer
acatatttctggtctcca

SEQ ID NO: 708 - DNA, 20 bp, Artificial Sequence
  Description of Artificial Sequence: Synthetic primer
acagggtggctatcattaac

SEQ ID NO: 709 - DNA, 19 bp, Artificial Sequence
  Description of Artificial Sequence: Synthetic primer
tgtgaactgaaaagtcaag

SEQ ID NO: 710 - DNA, 21 bp, Artificial Sequence
  Description of Artificial Sequence: Synthetic primer
cttgaacctatttctgttttt

SEQ ID NO: 711 - DNA, 20 bp, Artificial Sequence
  Description of Artificial Sequence: Synthetic primer
ctcccaagttagattggtta

SEQ ID NO: 712 - DNA, 17 bp, Artificial Sequence
  Description of Artificial Sequence: Synthetic primer
cttgatgtggctgaagt

SEQ ID NO: 713 - DNA, 19 bp, Artificial Sequence
  Description of Artificial Sequence: Synthetic primer
gtgctgttgaaatcctggg

SEQ ID NO: 714 - DNA, 18 bp, Artificial Sequence
  Description of Artificial Sequence: Synthetic primer
aaccctttgtcagctgaa

SEQ ID NO: 715 - DNA, 22 bp, Artificial Sequence
  Description of Artificial Sequence: Synthetic primer
caggcttttggctaagatcaag

SEQ ID NO: 716 - DNA, 24 bp, Artificial Sequence
  Description of Artificial Sequence: Synthetic primer
agtgaagaattttccctattagat

SEQ ID NO: 717 - DNA, 20 bp, Artificial Sequence
  Description of Artificial Sequence: Synthetic primer
aagtctagccaagaacattt

SEQ ID NO: 718 - DNA, 19 bp, Artificial Sequence
  Description of Artificial Sequence: Synthetic primer
ctcccactcctctcatcag

SEQ ID NO: 719 - DNA, 17 bp, Artificial Sequence
  Description of Artificial Sequence: Synthetic primer
gttgctgcccgctttcc

SEQ ID NO: 720 - DNA, 19 bp, Artificial Sequence
  Description of Artificial Sequence: Synthetic primer
ctctgtcacccatgctgga

SEQ ID NO: 721 - DNA, 17 bp, Artificial Sequence
  Description of Artificial Sequence: Synthetic primer
acctcctgggctcaagc

SEQ ID NO: 722 - DNA, 21 bp, Artificial Sequence
  Description of Artificial Sequence: Synthetic primer
ggaaggaatactaaagaacaa

SEQ ID NO: 723 - DNA, 20 bp, Artificial Sequence
  Description of Artificial Sequence: Synthetic primer
agtaagtgctgtgatgcacc

SEQ ID NO: 724 - DNA, 17 bp, Artificial Sequence
  Description of Artificial Sequence: Synthetic primer
tagctgagcatggtggc

SEQ ID NO: 725 - DNA, 17 bp, Artificial Sequence
  Description of Artificial Sequence: Synthetic primer
agcatgggtgacagagc

SEQ ID NO: 726 - DNA, 17 bp, Artificial Sequence
  Description of Artificial Sequence: Synthetic primer
tgtgttgcccagactag

SEQ ID NO: 727 - DNA, 17 bp, Artificial Sequence
  Description of Artificial Sequence: Synthetic primer
actccctggcctcccct

SEQ ID NO: 728 - DNA, 17 bp, Artificial Sequence
  Description of Artificial Sequence: Synthetic primer
tcacagagctgccaggg

SEQ ID NO: 729 - DNA, 17 bp, Artificial Sequence
  Description of Artificial Sequence: Synthetic primer
caaaattctcctgccac

SEQ ID NO: 730 - DNA, 17 bp, Artificial Sequence
  Description of Artificial Sequence: Synthetic primer
ggggaaagggaagtctg

SEQ ID NO: 731 - DNA, 17 bp, Artificial Sequence
  Description of Artificial Sequence: Synthetic primer
tagatgggctcttcttg

SEQ ID NO: 732 - DNA, 20 bp, Artificial Sequence
  Description of Artificial Sequence: Synthetic primer
tatggagcccaaggatgacc

SEQ ID NO: 733 - DNA, 30 bp, Artificial Sequence
  Description of Artificial Sequence: Synthetic primer
acgttggatgaactgagccccatgaaatgc

SEQ ID NO: 734 - DNA, 30 bp, Artificial Sequence
  Description of Artificial Sequence: Synthetic primer
acgttggatgctcctgaattttagccatac

SEQ ID NO: 735 - DNA, 31 bp, Artificial Sequence
  Description of Artificial Sequence: Synthetic primer
acgttggatggaagagcacattatttgctgg

SEQ ID NO: 736 - DNA, 30 bp, Artificial Sequence
  Description of Artificial Sequence: Synthetic primer
acgttggatggaaaggccttgaattggaac

SEQ ID NO: 737 - DNA, 30 bp, Artificial Sequence
  Description of Artificial Sequence: Synthetic primer
acgttggatggcagctacaatcataaaggg

SEQ ID NO: 738 - DNA, 30 bp, Artificial Sequence
  Description of Artificial Sequence: Synthetic primer
acgttggatgatggtcatggcatccagttc

SEQ ID NO: 739 - DNA, 30 bp, Artificial Sequence
  Description of Artificial Sequence: Synthetic primer
acgttggatgggagcatcagtcattttggg

SEQ ID NO: 740 - DNA, 30 bp, Artificial Sequence
  Description of Artificial Sequence: Synthetic primer
acgttggatggggttgtggagaatcattac

SEQ ID NO: 741 - DNA, 30 bp, Artificial Sequence
  Description of Artificial Sequence: Synthetic primer
acgttggatgtctctgcagttgaggagatg

SEQ ID NO: 742 - DNA, 30 bp, Artificial Sequence
  Description of Artificial Sequence: Synthetic primer
acgttggatgctctggataaaagactcagc

SEQ ID NO: 743 - DNA, 30 bp, Artificial Sequence
  Description of Artificial Sequence: Synthetic primer
acgttggatgttggtttgctatcaatgaag

SEQ ID NO: 744 - DNA, 30 bp, Artificial Sequence
  Description of Artificial Sequence: Synthetic primer
acgttggatgaaaaaacacaccacagcccc

SEQ ID NO: 745 - DNA, 30 bp, Artificial Sequence
  Description of Artificial Sequence: Synthetic primer
acgttggatgatgaaaagtgacacccatcc

SEQ ID NO: 746 - DNA, 30 bp, Artificial Sequence
  Description of Artificial Sequence: Synthetic primer
acgttggatgtagccaattggtgaacactc

SEQ ID NO: 747 - DNA, 30 bp, Artificial Sequence
  Description of Artificial Sequence: Synthetic primer
acgttggatggccaaggaaactaattcctg

SEQ ID NO: 748 - DNA, 31 bp, Artificial Sequence
  Description of Artificial Sequence: Synthetic primer
acgttggatggttgcattagctgttattctc

SEQ ID NO: 749 - DNA, 31 bp, Artificial Sequence
  Description of Artificial Sequence: Synthetic primer
acgttggatgcatggtttatacttacttacg

SEQ ID NO: 750 - DNA, 30 bp, Artificial Sequence
  Description of Artificial Sequence: Synthetic primer
acgttggatgggagggagacaaagattcac

SEQ ID NO: 751 - DNA, 30 bp, Artificial Sequence
  Description of Artificial Sequence: Synthetic primer
acgttggatgctcacagtcctgaagacttg

SEQ ID NO: 752 - DNA, 30 bp, Artificial Sequence
  Description of Artificial Sequence: Synthetic primer
acgttggatgggacttcaaatatggttcac

SEQ ID NO: 753 - DNA, 30 bp, Artificial Sequence
  Description of Artificial Sequence: Synthetic primer
acgttggatggttcccttcccccataaaac

SEQ ID NO: 754 - DNA, 30 bp, Artificial Sequence
  Description of Artificial Sequence: Synthetic primer
acgttggatgctaggcatatcatgcctctg

SEQ ID NO: 755 - DNA, 30 bp, Artificial Sequence
  Description of Artificial Sequence: Synthetic primer
acgttggatgtgtgctcaggatcgacagac

SEQ ID NO: 756 - DNA, 31 bp, Artificial Sequence
  Description of Artificial Sequence: Synthetic primer
acgttggatgcttttgagcatcacattcctc

SEQ ID NO: 757 - DNA, 30 bp, Artificial Sequence
  Description of Artificial Sequence: Synthetic primer
acgttggatgaactcccagtaagtccttcc

SEQ ID NO: 758 - DNA, 30 bp, Artificial Sequence
  Description of Artificial Sequence: Synthetic primer
acgttggatgtacacttttcccgcaagacc

SEQ ID NO: 759 - DNA, 30 bp, Artificial Sequence
  Description of Artificial Sequence: Synthetic primer
acgttggatggaaggccaatgcaaggatac

SEQ ID NO: 760 - DNA, 30 bp, Artificial Sequence
  Description of Artificial Sequence: Synthetic primer
acgttggatggagaagagcattggttgctg

SEQ ID NO: 761 - DNA, 30 bp, Artificial Sequence
  Description of Artificial Sequence: Synthetic primer
acgttggatggtctcaggaaggtttagagg

SEQ ID NO: 762 - DNA, 31 bp, Artificial Sequence
  Description of Artificial Sequence: Synthetic primer
acgttggatgcatgatttcaaaatcatgttc

SEQ ID NO: 763 - DNA, 30 bp, Artificial Sequence
  Description of Artificial Sequence: Synthetic primer
acgttggatgcagcgactagtcattaaccg

SEQ ID NO: 764 - DNA, 30 bp, Artificial Sequence
  Description of Artificial Sequence: Synthetic primer
acgttggatgcattgttgttcctaccattc

SEQ ID NO: 765 - DNA, 30 bp, Artificial Sequence
  Description of Artificial Sequence: Synthetic primer
acgttggatggtgcttgatacttggcctac

SEQ ID NO: 766 - DNA, 30 bp, Artificial Sequence
  Description of Artificial Sequence: Synthetic primer
acgttggatgtcaacatttactcctagctc

SEQ ID NO: 767 - DNA, 30 bp, Artificial Sequence
  Description of Artificial Sequence: Synthetic primer
acgttggatgtgtattctcctgcatcgctc

SEQ ID NO: 768 - DNA, 30 bp, Artificial Sequence
  Description of Artificial Sequence: Synthetic primer
acgttggatgttcgagtttaccgtatggtg

SEQ ID NO: 769 - DNA, 30 bp, Artificial Sequence
  Description of Artificial Sequence: Synthetic primer
acgttggatgctgagaccagtctgtgtttg

SEQ ID NO: 770 - DNA, 30 bp, Artificial Sequence
  Description of Artificial Sequence: Synthetic primer
acgttggatgctactactatttctggagtc

SEQ ID NO: 771 - DNA, 32 bp, Artificial Sequence
  Description of Artificial Sequence: Synthetic primer
acgttggatggtagatgcttgaatcaataaag

SEQ ID NO: 772 - DNA, 30 bp, Artificial Sequence
  Description of Artificial Sequence: Synthetic primer
acgttggatggaactgttgttgaatgggac

SEQ ID NO: 773 - DNA, 31 bp, Artificial Sequence
  Description of Artificial Sequence: Synthetic primer
acgttggatgctatctgtattctcatggctg

SEQ ID NO: 774 - DNA, 31 bp, Artificial Sequence
  Description of Artificial Sequence: Synthetic primer
acgttggatgctacatgtccatggtttgatg

SEQ ID NO: 775 - DNA, 31 bp, Artificial Sequence
  Description of Artificial Sequence: Synthetic primer
acgttggatggtatacagaatattgcatgcc

SEQ ID NO: 776 - DNA, 30 bp, Artificial Sequence
  Description of Artificial Sequence: Synthetic primer
acgttggatgcaaggatttattacatgctg

SEQ ID NO: 777 - DNA, 30 bp, Artificial Sequence
  Description of Artificial Sequence: Synthetic primer
acgttggatggaggaaaccagagcttcaag

SEQ ID NO: 778 - DNA, 30 bp, Artificial Sequence
  Description of Artificial Sequence: Synthetic primer
acgttggatgaaccagctcacctcaggaac

SEQ ID NO: 779 - DNA, 30 bp, Artificial Sequence
  Description of Artificial Sequence: Synthetic primer
acgttggatgaaaacagcaattgagaacac

SEQ ID NO: 780 - DNA, 30 bp, Artificial Sequence
  Description of Artificial Sequence: Synthetic primer
acgttggatgtacgcaatagttcctgggag

SEQ ID NO: 781 - DNA, 30 bp, Artificial Sequence
  Description of Artificial Sequence: Synthetic primer
acgttggatgacacactggtgttttgtcag

SEQ ID NO: 782 - DNA, 30 bp, Artificial Sequence
  Description of Artificial Sequence: Synthetic primer
acgttggatggttctgctagtgtcatcttc

SEQ ID NO: 783 - DNA, 30 bp, Artificial Sequence
  Description of Artificial Sequence: Synthetic primer
acgttggatgtgtgcccttaataatggttg

SEQ ID NO: 784 - DNA, 30 bp, Artificial Sequence
  Description of Artificial Sequence: Synthetic primer
acgttggatgggctggtttctgacactatc

SEQ ID NO: 785 - DNA, 30 bp, Artificial Sequence
  Description of Artificial Sequence: Synthetic primer
acgttggatgcaccaggacataacatgacg

SEQ ID NO: 786 - DNA, 30 bp, Artificial Sequence
  Description of Artificial Sequence: Synthetic primer
acgttggatgggtggcagtaatcttcactt

SEQ ID NO: 787 - DNA, 30 bp, Artificial Sequence
  Description of Artificial Sequence: Synthetic primer
acgttggatgttgggaaaggccatcaagtc

SEQ ID NO: 788 - DNA, 30 bp, Artificial Sequence
  Description of Artificial Sequence: Synthetic primer
acgttggatgcccttccaacagctatctgg

SEQ ID NO: 789 - DNA, 30 bp, Artificial Sequence
  Description of Artificial Sequence: Synthetic primer
acgttggatggataggtgtacacatatagc

SEQ ID NO: 790 - DNA, 30 bp, Artificial Sequence
  Description of Artificial Sequence: Synthetic primer
acgttggatgcttcgtatttggctctgacc

SEQ ID NO: 791 - DNA, 30 bp, Artificial Sequence
  Description of Artificial Sequence: Synthetic primer
acgttggatgtctgaagctgttgaatcagg

SEQ ID NO: 792 - DNA, 30 bp, Artificial Sequence
  Description of Artificial Sequence: Synthetic primer
acgttggatgctgccagtcataaggcaaag

SEQ ID NO: 793 - DNA, 30 bp, Artificial Sequence
  Description of Artificial Sequence: Synthetic primer
acgttggatgcactttggaagacagttcgg

SEQ ID NO: 794 - DNA, 30 bp, Artificial Sequence
  Description of Artificial Sequence: Synthetic primer
acgttggatgccagcaattctatttcagag

SEQ ID NO: 795 - DNA, 30 bp, Artificial Sequence
  Description of Artificial Sequence: Synthetic primer
acgttggatggtttattcctgtttccacac

SEQ ID NO: 796 - DNA, 30 bp, Artificial Sequence
  Description of Artificial Sequence: Synthetic primer
acgttggatggcaacagtttcacctttggc

SEQ ID NO: 797 - DNA, 30 bp, Artificial Sequence
  Description of Artificial Sequence: Synthetic primer
acgttggatgtggaagtgaaggagagaagc

SEQ ID NO: 798 - DNA, 30 bp, Artificial Sequence
  Description of Artificial Sequence: Synthetic primer
acgttggatgttaagcctgggacttttggg

SEQ ID NO: 799 - DNA, 30 bp, Artificial Sequence
  Description of Artificial Sequence: Synthetic primer
acgttggatgcatgaagccttatgcttgag

SEQ ID NO: 800 - DNA, 30 bp, Artificial Sequence
  Description of Artificial Sequence: Synthetic primer
acgttggatgttgagctcactgttacctgc

SEQ ID NO: 801 - DNA, 30 bp, Artificial Sequence
  Description of Artificial Sequence: Synthetic primer
acgttggatgactcgagacaacctacaagg

SEQ ID NO: 802 - DNA, 30 bp, Artificial Sequence
  Description of Artificial Sequence: Synthetic primer
acgttggatgtgcctaagcactgtataacc

SEQ ID NO: 803 - DNA, 30 bp, Artificial Sequence
  Description of Artificial Sequence: Synthetic primer
acgttggatgactcaggcagtaactccaac

SEQ ID NO: 804 - DNA, 31 bp, Artificial Sequence
  Description of Artificial Sequence: Synthetic primer
acgttggatggtcatggacatctacagtatc

SEQ ID NO: 805 - DNA, 28 bp, Artificial Sequence
  Description of Artificial Sequence: Synthetic primer
acgttggatgaagaacacacaaaaaaat

SEQ ID NO: 806 - DNA, 30 bp, Artificial Sequence
  Description of Artificial Sequence: Synthetic primer
acgttggatgtgcccacaagtgctatctac

SEQ ID NO: 807 - DNA, 30 bp, Artificial Sequence
  Description of Artificial Sequence: Synthetic primer
acgttggatgaaaagacaaacgatatggcc

SEQ ID NO: 808 - DNA, 30 bp, Artificial Sequence
  Description of Artificial Sequence: Synthetic primer
acgttggatggagatgtacagtatgagtcc

SEQ ID NO: 809 - DNA, 30 bp, Artificial Sequence
  Description of Artificial Sequence: Synthetic primer
acgttggatgcagttggtttcaactctgcc

SEQ ID NO: 810 - DNA, 30 bp, Artificial Sequence
  Description of Artificial Sequence: Synthetic primer
acgttggatgaaagtggtaaaggagaggcg

SEQ ID NO: 811 - DNA, 30 bp, Artificial Sequence
  Description of Artificial Sequence: Synthetic primer
acgttggatgcaactggaaattgccgaagc

SEQ ID NO: 812 - DNA, 30 bp, Artificial Sequence
  Description of Artificial Sequence: Synthetic primer
acgttggatgattttgggctgtggtcttcc

SEQ ID NO: 813 - DNA, 30 bp, Artificial Sequence
  Description of Artificial Sequence: Synthetic primer
acgttggatgtccaagttcaagaacgacac

SEQ ID NO: 814 - DNA, 30 bp, Artificial Sequence
  Description of Artificial Sequence: Synthetic primer
acgttggatggatcacagacaggtcagttg

SEQ ID NO: 815 - DNA, 30 bp, Artificial Sequence
  Description of Artificial Sequence: Synthetic primer
acgttggatggtttcccatgacactgttcc

SEQ ID NO: 816 - DNA, 31 bp, Artificial Sequence
  Description of Artificial Sequence: Synthetic primer
acgttggatgcttatgcatttcaactgccac

SEQ ID NO: 817 - DNA, 30 bp, Artificial Sequence
  Description of Artificial Sequence: Synthetic primer
acgttggatgatagcagctccagaactagg

SEQ ID NO: 818 - DNA, 31 bp, Artificial Sequence
  Description of Artificial Sequence: Synthetic primer
acgttggatgcaatacttgtaaaatagcagc

SEQ ID NO: 819 - DNA, 30 bp, Artificial Sequence
  Description of Artificial Sequence: Synthetic primer
acgttggatgttacctagttctggagctgc

SEQ ID NO: 820 - DNA, 30 bp, Artificial Sequence
  Description of Artificial Sequence: Synthetic primer
acgttggatggcatcaacctttatgccaag

SEQ ID NO: 821 - DNA, 30 bp, Artificial Sequence
  Description of Artificial Sequence: Synthetic primer
acgttggatggaacatcattgaaggtaaag

SEQ ID NO: 822 - DNA, 30 bp, Artificial Sequence
  Description of Artificial Sequence: Synthetic primer
acgttggatggtcatcaggagaaagtaagc

SEQ ID NO: 823 - DNA, 30 bp, Artificial Sequence
  Description of Artificial Sequence: Synthetic primer
acgttggatgcagcacgctgtttctcaatg

SEQ ID NO: 824 - DNA, 30 bp, Artificial Sequence
  Description of Artificial Sequence: Synthetic primer
acgttggatgtttgtggtgcccattcaaac

SEQ ID NO: 825 - DNA, 17 bp, Artificial Sequence
  Description of Artificial Sequence: Synthetic primer
ttgagaacacaggatgc

SEQ ID NO: 826 - DNA, 17 bp, Artificial Sequence
  Description of Artificial Sequence: Synthetic primer
ctcccattttggtcttg

SEQ ID NO: 827 - DNA, 20 bp, Artificial Sequence
  Description of Artificial Sequence: Synthetic primer
ggtgttttgtcagtacaatt

SEQ ID NO: 828 - DNA, 20 bp, Artificial Sequence
  Description of Artificial Sequence: Synthetic primer
actacaaactcttccttacc

SEQ ID NO: 829 - DNA, 24 bp, Artificial Sequence
  Description of Artificial Sequence: Synthetic primer
gttgtttatgttatgttatgtgtt

SEQ ID NO: 830 - DNA, 17 bp, Artificial Sequence
  Description of Artificial Sequence: Synthetic primer
tgtgcctcagtttctcc

SEQ ID NO: 831 - DNA, 20 bp, Artificial Sequence
  Description of Artificial Sequence: Synthetic primer
gacagctgtaattgtagacc

SEQ ID NO: 832 - DNA, 19 bp, Artificial Sequence
  Description of Artificial Sequence: Synthetic primer
ctcaatcacatttaccctc

SEQ ID NO: 833 - DNA, 23 bp, Artificial Sequence
  Description of Artificial Sequence: Synthetic primer
tctgattgttccattaatatctg

SEQ ID NO: 834 - DNA, 24 bp, Artificial Sequence
  Description of Artificial Sequence: Synthetic primer
cagctatctggaaatcttgtttga

SEQ ID NO: 835 - DNA, 22 bp, Artificial Sequence
  Description of Artificial Sequence: Synthetic primer
gtgtacacatatagcaacctca

SEQ ID NO: 836 - DNA, 18 bp, Artificial Sequence
  Description of Artificial Sequence: Synthetic primer
ctctgacctgtgagctac

SEQ ID NO: 837 - DNA, 22 bp, Artificial Sequence
  Description of Artificial Sequence: Synthetic primer
gctgttgaatcaggatttgatt

SEQ ID NO: 838 - DNA, 19 bp, Artificial Sequence
  Description of Artificial Sequence: Synthetic primer
ggcaaagaaacactagaaa

SEQ ID NO: 839 - DNA, 17 bp, Artificial Sequence
  Description of Artificial Sequence: Synthetic primer
cagttcggcagtttctt

SEQ ID NO: 840 - DNA, 23 bp, Artificial Sequence
  Description of Artificial Sequence: Synthetic primer
aaaaaatcatgaaaaggagcatg

SEQ ID NO: 841 - DNA, 18 bp, Artificial Sequence
  Description of Artificial Sequence: Synthetic primer
acaagtcttttcatggtc

SEQ ID NO: 842 - DNA, 22 bp, Artificial Sequence
  Description of Artificial Sequence: Synthetic primer
caaaatgaaggaacacttatca

SEQ ID NO: 843 - DNA, 17 bp, Artificial Sequence
  Description of Artificial Sequence: Synthetic primer
agctctgttggcacttt

SEQ ID NO: 844 - DNA, 23 bp, Artificial Sequence
  Description of Artificial Sequence: Synthetic primer
gagcctgattatttgtttgggta

SEQ ID NO: 845 - DNA, 20 bp, Artificial Sequence
  Description of Artificial Sequence: Synthetic primer
ctgtcatgattgacaggtcc

SEQ ID NO: 846 - DNA, 19 bp, Artificial Sequence
  Description of Artificial Sequence: Synthetic primer
cctgggcctggaaggcaac

SEQ ID NO: 847 - DNA, 17 bp, Artificial Sequence
  Description of Artificial Sequence: Synthetic primer
ggctggagcaagaatta

SEQ ID NO: 848 - DNA, 21 bp, Artificial Sequence
  Description of Artificial Sequence: Synthetic primer
caatgtaatccttggatagat

SEQ ID NO: 849 - DNA, 20 bp, Artificial Sequence
  Description of Artificial Sequence: Synthetic primer
caactacatagtcagacttt

SEQ ID NO: 850 - DNA, 20 bp, Artificial Sequence
  Description of Artificial Sequence: Synthetic primer
tatacgcaatagttcctggg

SEQ ID NO: 851 - DNA, 23 bp, Artificial Sequence
  Description of Artificial Sequence: Synthetic primer
gaacacacaaaaaaatttaatca

SEQ ID NO: 852 - DNA, 20 bp, Artificial Sequence
  Description of Artificial Sequence: Synthetic primer
ctctttaaacctgcattttc

SEQ ID NO: 853 - DNA, 17 bp, Artificial Sequence
  Description of Artificial Sequence: Synthetic primer
cgatatggccattttgg

SEQ ID NO: 854 - DNA, 21 bp, Artificial Sequence
  Description of Artificial Sequence: Synthetic primer
catattcacacaatgggaaaa

SEQ ID NO: 855 - DNA, 17 bp, Artificial Sequence
  Description of Artificial Sequence: Synthetic primer
ctgccaactatcagctt

SEQ ID NO: 856 - DNA, 21 bp, Artificial Sequence
  Description of Artificial Sequence: Synthetic primer
gcgagaccatggcatataaca

SEQ ID NO: 857 - DNA, 20 bp, Artificial Sequence
  Description of Artificial Sequence: Synthetic primer
aacttacacgtttgttgcta

SEQ ID NO: 858 - DNA, 18 bp, Artificial Sequence
  Description of Artificial Sequence: Synthetic primer
gtggtcttccggatatca

SEQ ID NO: 859 - DNA, 20 bp, Artificial Sequence
  Description of Artificial Sequence: Synthetic primer
cgacacaaatatgtagtgga

SEQ ID NO: 860 - DNA, 19 bp, Artificial Sequence
  Description of Artificial Sequence: Synthetic primer
tgtcttgctacattccagt

SEQ ID NO: 861 - DNA, 23 bp, Artificial Sequence
  Description of Artificial Sequence: Synthetic primer
tccagtaaaatggttccataaga

SEQ ID NO: 862 - DNA, 17 bp, Artificial Sequence
  Description of Artificial Sequence: Synthetic primer
tcaactgccacaaaatg

SEQ ID NO: 863 - DNA, 17 bp, Artificial Sequence
  Description of Artificial Sequence: Synthetic primer
ttcctttgtcccattca

SEQ ID NO: 864 - DNA, 21 bp, Artificial Sequence
  Description of Artificial Sequence: Synthetic primer
tgtaaaatagcagctccagaa

SEQ ID NO: 865 - DNA, 22 bp, Artificial Sequence
  Description of Artificial Sequence: Synthetic primer
attctaaatggaaaaagagcca

SEQ ID NO: 866 - DNA, 17 bp, Artificial Sequence
  Description of Artificial Sequence: Synthetic primer
tgccctgaatgtgcctc

SEQ ID NO: 867 - DNA, 23 bp, Artificial Sequence
  Description of Artificial Sequence: Synthetic primer
ggataagcatatgtaactttacg

SEQ ID NO: 868 - DNA, 23 bp, Artificial Sequence
  Description of Artificial Sequence: Synthetic primer
aagtaaaaaggacataaaaacct

SEQ ID NO: 869 - DNA, 20 bp, Artificial Sequence
  Description of Artificial Sequence: Synthetic primer
gttgatggaacaacataaaa

SEQ ID NO: 870 - DNA, 18 bp, Artificial Sequence
  Description of Artificial Sequence: Synthetic primer
gcccattcaaacataaag

SEQ ID NO: 871 - DNA, 30 bp, Artificial Sequence
  Description of Artificial Sequence: Synthetic primer
acgttggatgagcagccatcacatgatctg

SEQ ID NO: 872 - DNA, 30 bp, Artificial Sequence
  Description of Artificial Sequence: Synthetic primer
acgttggatgtggtctaagtcctgcacaag

SEQ ID NO: 873 - DNA, 30 bp, Artificial Sequence
  Description of Artificial Sequence: Synthetic primer
acgttggatgctccctgaacttcccatttc

SEQ ID NO: 874 - DNA, 30 bp, Artificial Sequence
  Description of Artificial Sequence: Synthetic primer
acgttggatgggtagccacatttgacacag

SEQ ID NO: 875 - DNA, 31 bp, Artificial Sequence
  Description of Artificial Sequence: Synthetic primer
acgttggatggctaatacatcctaaaggaac

SEQ ID NO: 876 - DNA, 30 bp, Artificial Sequence
  Description of Artificial Sequence: Synthetic primer
acgttggatgtttcttcttgtctcacaggc

SEQ ID NO: 877 - DNA, 30 bp, Artificial Sequence
  Description of Artificial Sequence: Synthetic primer
acgttggatgcaggataatgatcatccctg

SEQ ID NO: 878 - DNA, 30 bp, Artificial Sequence
  Description of Artificial Sequence: Synthetic primer
acgttggatgtagctatcccattgttgagg

SEQ ID NO: 879 - DNA, 30 bp, Artificial Sequence
  Description of Artificial Sequence: Synthetic primer
acgttggatgcctaccccaaataggtaaag

SEQ ID NO: 880 - DNA, 30 bp, Artificial Sequence
  Description of Artificial Sequence: Synthetic primer
acgttggatgagaatgtgagcaagggatgc

SEQ ID NO: 881 - DNA, 30 bp, Artificial Sequence
  Description of Artificial Sequence: Synthetic primer
acgttggatggtaaatctgtatctccgccc

SEQ ID NO: 882 - DNA, 31 bp, Artificial Sequence
  Description of Artificial Sequence: Synthetic primer
acgttggatgccaatgatcaaactgaaatcg

SEQ ID NO: 883 - DNA, 30 bp, Artificial Sequence
  Description of Artificial Sequence: Synthetic primer
acgttggatgcacccacagctatctgagtt

SEQ ID NO: 884 - DNA, 30 bp, Artificial Sequence
  Description of Artificial Sequence: Synthetic primer
acgttggatgaatggagtgtttgcatgttg

SEQ ID NO: 885 - DNA, 30 bp, Artificial Sequence
  Description of Artificial Sequence: Synthetic primer
acgttggatggccaaaaatagccttttctc

SEQ ID NO: 886 - DNA, 30 bp, Artificial Sequence
  Description of Artificial Sequence: Synthetic primer
acgttggatgttgcaagctggtgtcacaca

SEQ ID NO: 887 - DNA, 30 bp, Artificial Sequence
  Description of Artificial Sequence: Synthetic primer
acgttggatgctcctgtcatagaataggcc

SEQ ID NO: 888 - DNA, 30 bp, Artificial Sequence
  Description of Artificial Sequence: Synthetic primer
acgttggatgatcaaagtcttgtgcaggac

SEQ ID NO: 889 - DNA, 31 bp, Artificial Sequence
  Description of Artificial Sequence: Synthetic primer
acgttggatggcatagatagcttaatcatgg

SEQ ID NO: 890 - DNA, 30 bp, Artificial Sequence
  Description of Artificial Sequence: Synthetic primer
acgttggatgcatttgaggatcggagtgag

SEQ ID NO: 891 - DNA, 30 bp, Artificial Sequence
  Description of Artificial Sequence: Synthetic primer
acgttggatgcctagcacttgggaattagg

SEQ ID NO: 892 - DNA, 30 bp, Artificial Sequence
  Description of Artificial Sequence: Synthetic primer
acgttggatgctctctagttcctttgttgc

SEQ ID NO: 893 - DNA, 30 bp, Artificial Sequence
  Description of Artificial Sequence: Synthetic primer
acgttggatgtaaaagagaaatcccacagg

SEQ ID NO: 894 - DNA, 30 bp, Artificial Sequence
  Description of Artificial Sequence: Synthetic primer
acgttggatgctagggacccagcaaataac

SEQ ID NO: 895 - DNA, 30 bp, Artificial Sequence
  Description of Artificial Sequence: Synthetic primer
acgttggatgtctggcctctaagctaaagg

SEQ ID NO: 896 - DNA, 30 bp, Artificial Sequence
  Description of Artificial Sequence: Synthetic primer
acgttggatgaccttctcaggttcacgttc

SEQ ID NO: 897 - DNA, 30 bp, Artificial Sequence
  Description of Artificial Sequence: Synthetic primer
acgttggatgtgctatgggtatgcaaggtg

SEQ ID NO: 898 - DNA, 30 bp, Artificial Sequence
  Description of Artificial Sequence: Synthetic primer
acgttggatgatggctctaaaaagctgtcc

SEQ ID NO: 899 - DNA, 30 bp, Artificial Sequence
  Description of Artificial Sequence: Synthetic primer
acgttggatgtaaagcccagggctaaagac

SEQ ID NO: 900 - DNA, 30 bp, Artificial Sequence
  Description of Artificial Sequence: Synthetic primer
acgttggatgccagagtcatcgttatcacc

SEQ ID NO: 901 - DNA, 30 bp, Artificial Sequence
  Description of Artificial Sequence: Synthetic primer
acgttggatgcagcttttgaggcactttcc

SEQ ID NO: 902 - DNA, 30 bp, Artificial Sequence
  Description of Artificial Sequence: Synthetic primer
acgttggatgagtttccctacgtctctctc

SEQ ID NO: 903 - DNA, 31 bp, Artificial Sequence
  Description of Artificial Sequence: Synthetic primer
acgttggatgcatccaaaacccaacaaatcc

SEQ ID NO: 904 - DNA, 30 bp, Artificial Sequence
  Description of Artificial Sequence: Synthetic primer
acgttggatgttatagcactgatgggctcc

SEQ ID NO: 905 - DNA, 30 bp, Artificial Sequence
  Description of Artificial Sequence: Synthetic primer
acgttggatgattcctgtagcaggcaactg

SEQ ID NO: 906 - DNA, 30 bp, Artificial Sequence
  Description of Artificial Sequence: Synthetic primer
acgttggatgtgaggttctgtctgaacacc

SEQ ID NO: 907 - DNA, 30 bp, Artificial Sequence
  Description of Artificial Sequence: Synthetic primer
acgttggatgatctgactcagaagaagagc

SEQ ID NO: 908 - DNA, 30 bp, Artificial Sequence
  Description of Artificial Sequence: Synthetic primer
acgttggatgagatggcaacagcaacacag

SEQ ID NO: 909 - DNA, 30 bp, Artificial Sequence
  Description of Artificial Sequence: Synthetic primer
acgttggatgaaatggtatgtttgtgttcc

SEQ ID NO: 910 - DNA, 30 bp, Artificial Sequence; identical to SEQ ID NO: 909
  Description of Artificial Sequence: Synthetic primer

SEQ ID NO: 911 - DNA, 30 bp, Artificial Sequence; identical to SEQ ID NO: 621
  Description of Artificial Sequence: Synthetic primer

SEQ ID NO: 912 - DNA, 30 bp, Artificial Sequence
  Description of Artificial Sequence: Synthetic primer
acgttggatgatgaaataggcacgtggctc

SEQ ID NO: 913 - DNA, 30 bp, Artificial Sequence
  Description of Artificial Sequence: Synthetic primer
acgttggatgtatagctgaagcctgctttc

SEQ ID NO: 914 - DNA, 30 bp, Artificial Sequence
  Description of Artificial Sequence: Synthetic primer
acgttggatgaaggtgtttctcttcactgc

SEQ ID NO: 915 - DNA, 30 bp, Artificial Sequence
  Description of Artificial Sequence: Synthetic primer
acgttggatgtcactctgaggtcttggagc

SEQ ID NO: 916 - DNA, 30 bp, Artificial Sequence
  Description of Artificial Sequence: Synthetic primer
acgttggatgggaagtaattctctgggctg

SEQ ID NO: 917 - DNA, 30 bp, Artificial Sequence
  Description of Artificial Sequence: Synthetic primer
acgttggatgcagcctgttctctctgaaac

SEQ ID NO: 918 - DNA, 30 bp, Artificial Sequence
  Description of Artificial Sequence: Synthetic primer
acgttggatgcctgtttaaatcgtggctcc

SEQ ID NO: 919 - DNA, 30 bp, Artificial Sequence
  Description of Artificial Sequence: Synthetic primer
acgttggatgcaagcctttgcagctctatc

SEQ ID NO: 920 - DNA, 30 bp, Artificial Sequence
  Description of Artificial Sequence: Synthetic primer
acgttggatggaagtttacgtaaactctag

SEQ ID NO: 921 - DNA, 30 bp, Artificial Sequence
  Description of Artificial Sequence: Synthetic primer
acgttggatggtatttactgttgaacccag

SEQ ID NO: 922 - DNA, 30 bp, Artificial Sequence
  Description of Artificial Sequence: Synthetic primer
acgttggatgagattacaggcactagccac

SEQ ID NO: 923 - DNA, 30 bp, Artificial Sequence; identical to SEQ ID NO: 622
  Description of Artificial Sequence: Synthetic primer

SEQ ID NO: 924 - DNA, 30 bp, Artificial Sequence
  Description of Artificial Sequence: Synthetic primer
acgttggatgttcaggaagcagcaaccatc

SEQ ID NO: 925 - DNA, 30 bp, Artificial Sequence
  Description of Artificial Sequence: Synthetic primer
acgttggatgaacgaggtcaggagatcaag

SEQ ID NO: 926 - DNA, 30 bp, Artificial Sequence
  Description of Artificial Sequence: Synthetic primer
acgttggatggaaccaaggaagtctgactc

SEQ ID NO: 927 - DNA, 30 bp, Artificial Sequence
  Description of Artificial Sequence: Synthetic primer
acgttggatgatcaaagtccatactgcagg

SEQ ID NO: 928 - DNA, 30 bp, Artificial Sequence
  Description of Artificial Sequence: Synthetic primer
acgttggatgtgttgtattacctgaccctg

SEQ ID NO: 929 - DNA, 30 bp, Artificial Sequence
  Description of Artificial Sequence: Synthetic primer
acgttggatgcaatggtgtgatcttgcctc

SEQ ID NO: 930 - DNA, 30 bp, Artificial Sequence
  Description of Artificial Sequence: Synthetic primer
acgttggatgggttgagtatccctaatctg

SEQ ID NO: 931 - DNA, 31 bp, Artificial Sequence
  Description of Artificial Sequence: Synthetic primer
acgttggatgcaagctatgtcacagtttaag

SEQ ID NO: 932 - DNA, 30 bp, Artificial Sequence
  Description of Artificial Sequence: Synthetic primer
acgttggatgataataaatttagacttcac

SEQ ID NO: 933 - DNA, 30 bp, Artificial Sequence
  Description of Artificial Sequence: Synthetic primer
acgttggatggaattttgtttggctcacgg

SEQ ID NO: 934 - DNA, 29 bp, Artificial Sequence
  Description of Artificial Sequence: Synthetic primer
acgttggatgccatgcctgagttatttgc

SEQ ID NO: 935 - DNA, 30 bp, Artificial Sequence
  Description of Artificial Sequence: Synthetic primer
acgttggatgtaagcccaagtgctgttgag

SEQ ID NO: 936 - DNA, 30 bp, Artificial Sequence
  Description of Artificial Sequence: Synthetic primer
acgttggatgttggcctttagactcctggg

SEQ ID NO: 937 - DNA, 30 bp, Artificial Sequence
  Description of Artificial Sequence: Synthetic primer
acgttggatgaataaagggttatccaggcg

SEQ ID NO: 938 - DNA, 30 bp, Artificial Sequence
  Description of Artificial Sequence: Synthetic primer
acgttggatgttctgacaagttcctggctg

SEQ ID NO: 939 - DNA, 30 bp, Artificial Sequence
  Description of Artificial Sequence: Synthetic primer
acgttggatgggtaggttgactaatgcagc

SEQ ID NO: 940 - DNA, 30 bp, Artificial Sequence
  Description of Artificial Sequence: Synthetic primer
acgttggatgaaactcctgacctcgtgatc

SEQ ID NO: 941 - DNA, 30 bp, Artificial Sequence
  Description of Artificial Sequence: Synthetic primer
acgttggatggtctcaaactcctgacctcg

SEQ ID NO: 942 - DNA, 30 bp, Artificial Sequence
  Description of Artificial Sequence: Synthetic primer
acgttggatggatgttgcctctaggctagt

SEQ ID NO: 943 - DNA, 30 bp, Artificial Sequence
  Description of Artificial Sequence: Synthetic primer
acgttggatgaaaattagccatgcgtggtg

SEQ ID NO: 944 - DNA, 30 bp, Artificial Sequence
  Description of Artificial Sequence: Synthetic primer
acgttggatgtctatgtctccacttgcatg

SEQ ID NO: 945 - DNA, 31 bp, Artificial Sequence
  Description of Artificial Sequence: Synthetic primer
acgttggatggtgactagaatttttgtgtac

SEQ ID NO: 946 - DNA, 30 bp, Artificial Sequence
  Description of Artificial Sequence: Synthetic primer
acgttggatgaacctcccactttggctttc

SEQ ID NO: 947 - DNA, 30 bp, Artificial Sequence
  Description of Artificial Sequence: Synthetic primer
acgttggatgatcaacctgcaccaccaatc

SEQ ID NO: 948 - DNA, 30 bp, Artificial Sequence
  Description of Artificial Sequence: Synthetic primer
acgttggatgttctccatcactgcatcaag

SEQ ID NO: 949 - DNA, 30 bp, Artificial Sequence
  Description of Artificial Sequence: Synthetic primer
acgttggatgctaaataacaggtttgactc

SEQ ID NO: 950 - DNA, 31 bp, Artificial Sequence
  Description of Artificial Sequence: Synthetic primer
acgttggatggtgaacatgtcttttctgtac

SEQ ID NO: 951 - DNA, 30 bp, Artificial Sequence
  Description of Artificial Sequence: Synthetic primer
acgttggatggggtcacttgaattcaggag

SEQ ID NO: 952 - DNA, 30 bp, Artificial Sequence
  Description of Artificial Sequence: Synthetic primer
acgttggatgtagtgaaactctgtctctgc

SEQ ID NO: 953 - DNA, 30 bp, Artificial Sequence
  Description of Artificial Sequence: Synthetic primer
acgttggatgtggatttacagaaaaactgc

SEQ ID NO: 954 - DNA, 30 bp, Artificial Sequence
  Description of Artificial Sequence: Synthetic primer
acgttggatgtttctgctgggctgtgatag

SEQ ID NO: 955 - DNA, 30 bp, Artificial Sequence
  Description of Artificial Sequence: Synthetic primer
acgttggatgtattttgggatggtgtgggc

SEQ ID NO: 956 - DNA, 30 bp, Artificial Sequence
  Description of Artificial Sequence: Synthetic primer
acgttggatgtcacttgaacccaggagatg

SEQ ID NO: 957 - DNA, 30 bp, Artificial Sequence
  Description of Artificial Sequence: Synthetic primer
acgttggatgtcactgagttcaactccttc

SEQ ID NO: 958 - DNA, 30 bp, Artificial Sequence
  Description of Artificial Sequence: Synthetic primer
acgttggatgttctgggtggttgctctctg

SEQ ID NO: 959 - DNA, 30 bp, Artificial Sequence
  Description of Artificial Sequence: Synthetic primer
acgttggatgtcctactccagtatgacctc

SEQ ID NO: 960 - DNA, 30 bp, Artificial Sequence
  Description of Artificial Sequence: Synthetic primer
acgttggatgtgcaaactggtgcatcagag

SEQ ID NO: 961 - DNA, 30 bp, Artificial Sequence
  Description of Artificial Sequence: Synthetic primer
acgttggatgggcacatggatatggtgaag

SEQ ID NO: 962 - DNA, 30 bp, Artificial Sequence; identical to SEQ ID NO: 961
  Description of Artificial Sequence: Synthetic primer

SEQ ID NO: 963 - DNA, 30 bp, Artificial Sequence; identical to SEQ ID NO: 913
  Description of Artificial Sequence: Synthetic primer

SEQ ID NO: 964 - DNA, 30 bp, Artificial Sequence
  Description of Artificial Sequence: Synthetic primer
acgttggatggtttctcttcactgctatct

SEQ ID NO: 965 - DNA, 30 bp, Artificial Sequence
  Description of Artificial Sequence: Synthetic primer
acgttggatgtactaatgtcagtggtagag

SEQ ID NO: 966 - DNA, 30 bp, Artificial Sequence
  Description of Artificial Sequence: Synthetic primer
acgttggatgttcagtgatccaacttccgc

SEQ ID NO: 967 - DNA, 30 bp, Artificial Sequence
  Description of Artificial Sequence: Synthetic primer
acgttggatggcagaaacccagtgaagtag

SEQ ID NO: 968 - DNA, 30 bp, Artificial Sequence
  Description of Artificial Sequence: Synthetic primer
acgttggatgatcctggagatgttataccc

SEQ ID NO: 969 - DNA, 30 bp, Artificial Sequence
  Description of Artificial Sequence: Synthetic primer
acgttggatgagattacaggcatgagccac

SEQ ID NO: 970 - DNA, 30 bp, Artificial Sequence
  Description of Artificial Sequence: Synthetic primer
acgttggatgaggctaattccttctcctgg

SEQ ID NO: 971 - DNA, 30 bp, Artificial Sequence
  Description of Artificial Sequence: Synthetic primer
acgttggatgatgcctgccttacgagaatg

SEQ ID NO: 972 - DNA, 31 bp, Artificial Sequence
  Description of Artificial Sequence: Synthetic primer
acgttggatggcaaagactaagagtctgtag

SEQ ID NO: 973 - DNA, 30 bp, Artificial Sequence
  Description of Artificial Sequence: Synthetic primer
acgttggatgctgtccctcttagagcaatg

SEQ ID NO: 974 - DNA, 35 bp, Artificial Sequence
  Description of Artificial Sequence: Synthetic primer
acgttggatgccaattgtgtcaaacatttaatgaa

SEQ ID NO: 975 - DNA, 30 bp, Artificial Sequence
  Description of Artificial Sequence: Synthetic primer
acgttggatggacagaaagagtgtgcagtc

SEQ ID NO: 976 - DNA, 30 bp, Artificial Sequence
  Description of Artificial Sequence: Synthetic primer
acgttggatgcagggagcttactacaaagc

SEQ ID NO: 977 - DNA, 30 bp, Artificial Sequence
  Description of Artificial Sequence: Synthetic primer
acgttggatgaagtggcctggaaaccaatg

SEQ ID NO: 978 - DNA, 30 bp, Artificial Sequence
  Description of Artificial Sequence: Synthetic primer
acgttggatgctttattggaaatctgttcg

SEQ ID NO: 979 - DNA, 30 bp, Artificial Sequence
  Description of Artificial Sequence: Synthetic primer
acgttggatgctgtagattttccttttggc

SEQ ID NO: 980 - DNA, 30 bp, Artificial Sequence
  Description of Artificial Sequence: Synthetic primer
acgttggatgactggcacaattagtgtctg

SEQ ID NO: 981 - DNA, 31 bp, Artificial Sequence
  Description of Artificial Sequence: Synthetic primer
acgttggatggctaaagtctgaaaacactag

SEQ ID NO: 982 - DNA, 30 bp, Artificial Sequence
  Description of Artificial Sequence: Synthetic primer
acgttggatgaggaagtaagttttgggagg

SEQ ID NO: 983 - DNA, 30 bp, Artificial Sequence
  Description of Artificial Sequence: Synthetic primer
acgttggatgaatggcacagctatcctcag

SEQ ID NO: 984 - DNA, 30 bp, Artificial Sequence
  Description of Artificial Sequence: Synthetic primer
acgttggatggacttgattacgtgacctgg

SEQ ID NO: 985 - DNA, 30 bp, Artificial Sequence
  Description of Artificial Sequence: Synthetic primer
acgttggatgggactggattagatgaattc

SEQ ID NO: 986 - DNA, 30 bp, Artificial Sequence
  Description of Artificial Sequence: Synthetic primer
acgttggatgtccaaaaggagtgggtagag

SEQ ID NO: 987 - DNA, 31 bp, Artificial Sequence
  Description of Artificial Sequence: Synthetic primer
acgttggatgcatggatttttaggacatgcg

SEQ ID NO: 988 - DNA, 30 bp, Artificial Sequence
  Description of Artificial Sequence: Synthetic primer
acgttggatgaaacaacatgcaaacactcc

SEQ ID NO: 989 - DNA, 30 bp, Artificial Sequence
  Description of Artificial Sequence: Synthetic primer
acgttggatgagaccagccactactgattc

SEQ ID NO: 990 - DNA, 30 bp, Artificial Sequence
  Description of Artificial Sequence: Synthetic primer
acgttggatggcatagcacatgctatttgg

SEQ ID NO: 991 - DNA, 30 bp, Artificial Sequence
  Description of Artificial Sequence: Synthetic primer
acgttggatggcactttagggacatttgac

SEQ ID NO: 992 - DNA, 30 bp, Artificial Sequence
  Description of Artificial Sequence: Synthetic primer
acgttggatgaaaccaatagaagcaggttg

SEQ ID NO: 993 - DNA, 30 bp, Artificial Sequence
  Description of Artificial Sequence: Synthetic primer
acgttggatgccctgtgtctgcaaatttgg

SEQ ID NO: 994 - DNA, 30 bp, Artificial Sequence
  Description of Artificial Sequence: Synthetic primer
acgttggatggatgcgtgaaatagatgctc

SEQ ID NO: 995 - DNA, 30 bp, Artificial Sequence
  Description of Artificial Sequence: Synthetic primer
acgttggatgatttcaaaagtggtctccac

SEQ ID NO: 996 - DNA, 30 bp, Artificial Sequence
  Description of Artificial Sequence: Synthetic primer
acgttggatgctcagcagatgttagttttc

SEQ ID NO: 997 - DNA, 30 bp, Artificial Sequence
  Description of Artificial Sequence: Synthetic primer
acgttggatgaccatctgagggaaatcctg

SEQ ID NO: 998 - DNA, 30 bp, Artificial Sequence
  Description of Artificial Sequence: Synthetic primer
acgttggatgcagtggtgttgatagatggg

SEQ ID NO: 999 - DNA, 30 bp, Artificial Sequence
  Description of Artificial Sequence: Synthetic primer
acgttggatgaagggcaccatgccattaac

SEQ ID NO: 1000 - DNA, 30 bp, Artificial Sequence
  Description of Artificial Sequence: Synthetic primer
acgttggatgggttgttgaaggagcgagag

SEQ ID NO: 1001 - DNA, 30 bp, Artificial Sequence
  Description of Artificial Sequence: Synthetic primer
acgttggatgcagccttcttcctgatacag

SEQ ID NO: 1002 - DNA, 30 bp, Artificial Sequence
  Description of Artificial Sequence: Synthetic primer
acgttggatgagaagatggccagaaaggag

SEQ ID NO: 1003 - DNA, 30 bp, Artificial Sequence
  Description of Artificial Sequence: Synthetic primer
acgttggatgcctcactaaggattcaaccc

SEQ ID NO: 1004 - DNA, 30 bp, Artificial Sequence
  Description of Artificial Sequence: Synthetic primer
acgttggatgagcaccttgcatacccatag

SEQ ID NO: 1005 - DNA, 30 bp, Artificial Sequence
  Description of Artificial Sequence: Synthetic primer
acgttggatgagtaactctagcctctgctc

SEQ ID NO: 1006 - DNA, 30 bp, Artificial Sequence
  Description of Artificial Sequence: Synthetic primer
acgttggatgagagaggtgtgtgacttttc

SEQ ID NO: 1007 - DNA, 30 bp, Artificial Sequence
  Description of Artificial Sequence: Synthetic primer
acgttggatgctgtgacatacttttccagg

SEQ ID NO: 1008 - DNA, 30 bp, Artificial Sequence
  Description of Artificial Sequence: Synthetic primer
acgttggatggctagctctactctcttctc

SEQ ID NO: 1009 - DNA, 30 bp, Artificial Sequence
  Description of Artificial Sequence: Synthetic primer
acgttggatgtggctgcaatggctaacttc

SEQ ID NO: 1010 - DNA, 30 bp, Artificial Sequence
  Description of Artificial Sequence: Synthetic primer
acgttggatgggcattaatggaggttatgc

SEQ ID NO: 1011 - DNA, 30 bp, Artificial Sequence
  Description of Artificial Sequence: Synthetic primer
acgttggatgccaacagcagcttcacaatc

SEQ ID NO: 1012 - DNA, 30 bp, Artificial Sequence
  Description of Artificial Sequence: Synthetic primer
acgttggatgtaatttttcccccccaaatc

SEQ ID NO: 1013 - DNA, 30 bp, Artificial Sequence; identical to SEQ ID NO: 1012
  Description of Artificial Sequence: Synthetic primer

SEQ ID NO: 1014 - DNA, 30 bp, Artificial Sequence; identical to SEQ ID NO: 912
  Description of Artificial Sequence: Synthetic primer

SEQ ID NO: 1015 - DNA, 30 bp, Artificial Sequence; identical to SEQ ID NO: 621
  Description of Artificial Sequence: Synthetic primer

SEQ ID NO: 1016 - DNA, 30 bp, Artificial Sequence
  Description of Artificial Sequence: Synthetic primer
acgttggatgcagtgaagagaaacaccttg

SEQ ID NO: 1017 - DNA, 30 bp, Artificial Sequence
  Description of Artificial Sequence: Synthetic primer
acgttggatgggagggagagaactatcaaa

SEQ ID NO: 1018 - DNA, 30 bp, Artificial Sequence
  Description of Artificial Sequence: Synthetic primer
acgttggatgtaaagggttatccaggcgtc

SEQ ID NO: 1019 - DNA, 30 bp, Artificial Sequence
  Description of Artificial Sequence: Synthetic primer
acgttggatgaagtgatcctcccacctcag

SEQ ID NO: 1020 - DNA, 30 bp, Artificial Sequence
  Description of Artificial Sequence: Synthetic primer
acgttggatgggatgcaagaggttgtagag

SEQ ID NO: 1021 - DNA, 30 bp, Artificial Sequence
  Description of Artificial Sequence: Synthetic primer
acgttggatgaaacataaggaagctgaggc

SEQ ID NO: 1022 - DNA, 30 bp, Artificial Sequence
  Description of Artificial Sequence: Synthetic primer
acgttggatgcctcataagggcctttgtac

SEQ ID NO: 1023 - DNA, 30 bp, Artificial Sequence
  Description of Artificial Sequence: Synthetic primer
acgttggatggtgtgtggcttattgtagag

SEQ ID NO: 1024 - DNA, 30 bp, Artificial Sequence
  Description of Artificial Sequence: Synthetic primer
acgttggatgatgtgggtaagttgtgcacc

SEQ ID NO: 1025 - DNA, 30 bp, Artificial Sequence
  Description of Artificial Sequence: Synthetic primer
acgttggatgtctgggcaacatggtgaaac

SEQ ID NO: 1026 - DNA, 30 bp, Artificial Sequence
  Description of Artificial Sequence: Synthetic primer
acgttggatgtttcagaacaaaccccacag

SEQ ID NO: 1027 - DNA, 30 bp, Artificial Sequence
  Description of Artificial Sequence: Synthetic primer
acgttggatgtatgctgtgacctctccaac

SEQ ID NO: 1028 - DNA, 30 bp, Artificial Sequence
  Description of Artificial Sequence: Synthetic primer
acgttggatgcacgcccggctaattttttc

SEQ ID NO: 1029 - DNA, 30 bp, Artificial Sequence
  Description of Artificial Sequence: Synthetic primer
acgttggatgaaagctaccagtcatgtgcc

SEQ ID NO: 1030 - DNA, 30 bp, Artificial Sequence
  Description of Artificial Sequence: Synthetic primer
acgttggatgtatgatcgtaggcactggag

SEQ ID NO: 1031 - DNA, 30 bp, Artificial Sequence
  Description of Artificial Sequence: Synthetic primer
acgttggatgaagcaaaccactgagtgtcc

SEQ ID NO: 1032 - DNA, 30 bp, Artificial Sequence
  Description of Artificial Sequence: Synthetic primer
acgttggatgattagccaagtgtggcagtg

SEQ ID NO: 1033 - DNA, 30 bp, Artificial Sequence
  Description of Artificial Sequence: Synthetic primer
acgttggatgctttcagtgtcgtgtcaggg

SEQ ID NO: 1034 - DNA, 30 bp, Artificial Sequence
  Description of Artificial Sequence: Synthetic primer
acgttggatgagtctttgcccttaatgtgg

SEQ ID NO: 1035 - DNA, 30 bp, Artificial Sequence
  Description of Artificial Sequence: Synthetic primer
acgttggatgaaaatactggtgcggccaga

SEQ ID NO: 1036 - DNA, 30 bp, Artificial Sequence
  Description of Artificial Sequence: Synthetic primer
acgttggatgattgctgctggaagcttacc

SEQ ID NO: 1037 - DNA, 30 bp, Artificial Sequence
  Description of Artificial Sequence: Synthetic primer
acgttggatgatggagaaagtagatagtag

SEQ ID NO: 1038 - DNA, 31 bp, Artificial Sequence
  Description of Artificial Sequence: Synthetic primer
acgttggatgctcagaagtctgatgtgtatc

SEQ ID NO: 1039 - DNA, 30 bp, Artificial Sequence
  Description of Artificial Sequence: Synthetic primer
acgttggatgagaagacacatagccgagag

SEQ ID NO: 1040 - DNA, 30 bp, Artificial Sequence
  Description of Artificial Sequence: Synthetic primer
acgttggatgtggagccctgtattcttcac

SEQ ID NO: 1041 - DNA, 30 bp, Artificial Sequence
  Description of Artificial Sequence: Synthetic primer
acgttggatggctgcattagtcaacctacc

SEQ ID NO: 1042 - DNA, 30 bp, Artificial Sequence
  Description of Artificial Sequence: Synthetic primer
acgttggatgtgaggtcccgaaccaatttc

SEQ ID NO: 1043 - DNA, 30 bp, Artificial Sequence
  Description of Artificial Sequence: Synthetic primer
acgttggatgctccttaagaagatagaggc

SEQ ID NO: 1044 - DNA, 30 bp, Artificial Sequence
  Description of Artificial Sequence: Synthetic primer
acgttggatgaagaagatagaggcagctgg

SEQ ID NO: 1045 - DNA, 30 bp, Artificial Sequence
  Description of Artificial Sequence: Synthetic primer
acgttggatgcaccatctgacctgtgctac

SEQ ID NO: 1046 - DNA, 30 bp, Artificial Sequence
  Description of Artificial Sequence: Synthetic primer
acgttggatgttcaagcggttctcctgcct

SEQ ID NO: 1047 - DNA, 30 bp, Artificial Sequence
  Description of Artificial Sequence: Synthetic primer
acgttggatgacacatttgcacacacacac

SEQ ID NO: 1048 - DNA, 30 bp, Artificial Sequence
  Description of Artificial Sequence: Synthetic primer
acgttggatggtgtgtgcaaatgtgtatcc

SEQ ID NO: 1049 - DNA, 30 bp, Artificial Sequence
  Description of Artificial Sequence: Synthetic primer
acgttggatgggtccatttaaagcctggtg

SEQ ID NO: 1050 - DNA, 31 bp, Artificial Sequence
  Description of Artificial Sequence: Synthetic primer
acgttggatggctaagatggaagttgaagtg

SEQ ID NO: 1051 - DNA, 30 bp, Artificial Sequence
  Description of Artificial Sequence: Synthetic primer
acgttggatggttatagcctgtatcgcagc

SEQ ID NO: 1052 - DNA, 30 bp, Artificial Sequence
  Description of Artificial Sequence: Synthetic primer
acgttggatggaacattgagagtatcttat

SEQ ID NO: 1053 - DNA, 30 bp, Artificial Sequence
  Description of Artificial Sequence: Synthetic primer
acgttggatgggtagaaccactgtttttcg

SEQ ID NO: 1054 - DNA, 30 bp, Artificial Sequence
  Description of Artificial Sequence: Synthetic primer
acgttggatgactgcaaccactgcctcttg

SEQ ID NO: 1055 - DNA, 30 bp, Artificial Sequence
  Description of Artificial Sequence: Synthetic primer
acgttggatgacctgcaccaacctttaacc

SEQ ID NO: 1056 - DNA, 30 bp, Artificial Sequence
  Description of Artificial Sequence: Synthetic primer
acgttggatgctgtgagacactagggatac

SEQ ID NO: 1057 - DNA, 30 bp, Artificial Sequence
  Description of Artificial Sequence: Synthetic primer
acgttggatggggaaatgctcagcatgtac

SEQ ID NO: 1058 - DNA, 30 bp, Artificial Sequence
  Description of Artificial Sequence: Synthetic primer
acgttggatggaaccaggtcttccttgatg

SEQ ID NO: 1059 - DNA, 30 bp, Artificial Sequence
  Description of Artificial Sequence: Synthetic primer
acgttggatggttttgagacagagtttcgc

SEQ ID NO: 1060 - DNA, 30 bp, Artificial Sequence
  Description of Artificial Sequence: Synthetic primer
acgttggatggttcctgctttaccacttcg

SEQ ID NO: 1061 - DNA, 30 bp, Artificial Sequence
  Description of Artificial Sequence: Synthetic primer
acgttggatgaagtaatggcacactggagg

SEQ ID NO: 1062 - DNA, 30 bp, Artificial Sequence
  Description of Artificial Sequence: Synthetic primer
acgttggatggaagtcccaacccctaatac

SEQ ID NO: 1063 - DNA, 30 bp, Artificial Sequence
  Description of Artificial Sequence: Synthetic primer
acgttggatgcctggtattttcatatcgcc

SEQ ID NO: 1064 - DNA, 30 bp, Artificial Sequence
  Description of Artificial Sequence: Synthetic primer
acgttggatgtgcctctgtgatggtgtccc

SEQ ID NO: 1065 - DNA, 30 bp, Artificial Sequence
  Description of Artificial Sequence: Synthetic primer
acgttggatgaaataggcacgtggctcccc

SEQ ID NO: 1066 - DNA, 30 bp, Artificial Sequence
  Description of Artificial Sequence: Synthetic primer
acgttggatgtagcagtgaagagaaacacc

SEQ ID NO: 1067 - DNA, 30 bp, Artificial Sequence
  Description of Artificial Sequence: Synthetic primer
acgttggatgacacgccattctgagaagag

SEQ ID NO: 1068 - DNA, 30 bp, Artificial Sequence
  Description of Artificial Sequence: Synthetic primer
acgttggatgtgaagacactggctgaaaac

SEQ ID NO: 1069 - DNA, 28 bp, Artificial Sequence
  Description of Artificial Sequence: Synthetic primer
acgttggatgccaaactccttgattggc

SEQ ID NO: 1070 - DNA, 30 bp, Artificial Sequence
  Description of Artificial Sequence: Synthetic primer
acgttggatgaaaccagttactaactgtag

SEQ ID NO: 1071 - DNA, 30 bp, Artificial Sequence
  Description of Artificial Sequence: Synthetic primer
acgttggatgcctggtgtttaaggctcaac

SEQ ID NO: 1072 - DNA, 30 bp, Artificial Sequence
  Description of Artificial Sequence: Synthetic primer
acgttggatgaagttaaataagctcttctg

SEQ ID NO: 1073 - DNA, 30 bp, Artificial Sequence
  Description of Artificial Sequence: Synthetic primer
acgttggatgtcgtgcaacatcactgtgtc

SEQ ID NO: 1074 - DNA, 30 bp, Artificial Sequence
  Description of Artificial Sequence: Synthetic primer
acgttggatgtgtcactagaatatgtgaac

SEQ ID NO: 1075 - DNA, 30 bp, Artificial Sequence
  Description of Artificial Sequence: Synthetic primer
acgttggatgctgagccagattctgacatt

SEQ ID NO: 1076 - DNA, 30 bp, Artificial Sequence
  Description of Artificial Sequence: Synthetic primer
acgttggatgctatgagcctttgacacagc

SEQ ID NO: 1077 - DNA, 18 bp, Artificial Sequence
  Description of Artificial Sequence: Synthetic primer
ctgaaagacaccatttat

SEQ ID NO: 1078 - DNA, 21 bp, Artificial Sequence
  Description of Artificial Sequence: Synthetic primer
gtcctgcacaagactttgata

SEQ ID NO: 1079 - DNA, 21 bp, Artificial Sequence
  Description of Artificial Sequence: Synthetic primer
cccatttcataccacctatca

SEQ ID NO: 1080 - DNA, 19 bp, Artificial Sequence
  Description of Artificial Sequence: Synthetic primer
ctccctcctccttgagacc

SEQ ID NO: 1081 - DNA, 23 bp, Artificial Sequence
  Description of Artificial Sequence: Synthetic primer
gatcattcatgaaacagattcta

SEQ ID NO: 1082 - DNA, 24 bp, Artificial Sequence
  Description of Artificial Sequence: Synthetic primer
tgttctcaaggaaaaaagaaaaaa

SEQ ID NO: 1083 - DNA, 20 bp, Artificial Sequence
  Description of Artificial Sequence: Synthetic primer
gatcatccctgggaatggta

SEQ ID NO: 1084 - DNA, 20 bp, Artificial Sequence
  Description of Artificial Sequence: Synthetic primer
gaggcagggaatcagcaata

SEQ ID NO: 1085 - DNA, 23 bp, Artificial Sequence
  Description of Artificial Sequence: Synthetic primer
accccaaataggtaaagatctgt

SEQ ID NO: 1086 - DNA, 20 bp, Artificial Sequence
  Description of Artificial Sequence: Synthetic primer
ctcctgcactgagctcctat

SEQ ID NO: 1087 - DNA, 21 bp, Artificial Sequence
  Description of Artificial Sequence: Synthetic primer
tatctccgccctaagaatact

SEQ ID NO: 1088 - DNA, 23 bp, Artificial Sequence
  Description of Artificial Sequence: Synthetic primer
gaaatattagaatttagaggcag

SEQ ID NO: 1089 - DNA, 22 bp, Artificial Sequence
  Description of Artificial Sequence: Synthetic primer
gagtttttatgagaaagggcaa

SEQ ID NO: 1090 - DNA, 24 bp, Artificial Sequence
  Description of Artificial Sequence: Synthetic primer
gttgttttaaagtgttggttgtaa

SEQ ID NO: 1091 - DNA, 22 bp, Artificial Sequence
  Description of Artificial Sequence: Synthetic primer
caatacatagtgaagctttggg

SEQ ID NO: 1092 - DNA, 21 bp, Artificial Sequence
  Description of Artificial Sequence: Synthetic primer
ctggtgtcacacacacatgta

SEQ ID NO: 1093 - DNA, 20 bp, Artificial Sequence
  Description of Artificial Sequence: Synthetic primer
ggaacatctcagaaaaaaaa

SEQ ID NO: 1094 - DNA, 20 bp, Artificial Sequence
  Description of Artificial Sequence: Synthetic primer
cttgtgcaggacttagacca

SEQ ID NO: 1095 - DNA, 23 bp, Artificial Sequence
  Description of Artificial Sequence: Synthetic primer
ataggctttcttgtgtatttgca

SEQ ID NO: 1096 - DNA, 19 bp, Artificial Sequence
  Description of Artificial Sequence: Synthetic primer
agtgaggggaagcagagtc

SEQ ID NO: 1097 - DNA, 20 bp, Artificial Sequence
  Description of Artificial Sequence: Synthetic primer
acttgggaattaggtggagg

SEQ ID NO: 1098 - DNA, 23 bp, Artificial Sequence
  Description of Artificial Sequence: Synthetic primer
gttcagagataatgctgctgatc

SEQ ID NO: 1099 - DNA, 21 bp, Artificial Sequence
  Description of Artificial Sequence: Synthetic primer
gaaatcccacaggaacacaat

SEQ ID NO: 1100 - DNA, 24 bp, Artificial Sequence
  Description of Artificial Sequence: Synthetic primer
cccagcaaataacaagaattggcc

SEQ ID NO: 1101 - DNA, 18 bp, Artificial Sequence
  Description of Artificial Sequence: Synthetic primer
cttaagccaagacaaaca

SEQ ID NO: 1102 - DNA, 19 bp, Artificial Sequence
  Description of Artificial Sequence: Synthetic primer
ttcatcttccaccctggcc

SEQ ID NO: 1103 - DNA, 20 bp, Artificial Sequence
  Description of Artificial Sequence: Synthetic primer
tgctttgcttgcctcccaca

SEQ ID NO: 1104 - DNA, 22 bp, Artificial Sequence
  Description of Artificial Sequence: Synthetic primer
gctgtcctttttacaaggaaat

SEQ ID NO: 1105 - DNA, 22 bp, Artificial Sequence
  Description of Artificial Sequence: Synthetic primer
taaagactgaagctttcacagt

SEQ ID NO: 1106 - DNA, 21 bp, Artificial Sequence
  Description of Artificial Sequence: Synthetic primer
cgttatcaccattgggcttta

SEQ ID NO: 1107 - DNA, 21 bp, Artificial Sequence
  Description of Artificial Sequence: Synthetic primer
gatccttctcacttactgttc

SEQ ID NO: 1108 - DNA, 22 bp, Artificial Sequence
  Description of Artificial Sequence: Synthetic primer
gattatgccctgaggtcttttg

SEQ ID NO: 1109 - DNA, 20 bp, Artificial Sequence
  Description of Artificial Sequence: Synthetic primer
aacccaacaaatcctagggc

SEQ ID NO: 1110 - DNA, 19 bp, Artificial Sequence
  Description of Artificial Sequence: Synthetic primer
gatgggctccccatatgac

SEQ ID NO: 1111 - DNA, 24 bp, Artificial Sequence
  Description of Artificial Sequence: Synthetic primer
tgtagcaggcaactgagcaggaga

SEQ ID NO: 1112 - DNA, 19 bp, Artificial Sequence
  Description of Artificial Sequence: Synthetic primer
gaacaccctccagcacaag

SEQ ID NO: 1113 - DNA, 21 bp, Artificial Sequence
  Description of Artificial Sequence: Synthetic primer
agaagagctttcatctgtgtg

SEQ ID NO: 1114 - DNA, 19 bp, Artificial Sequence
  Description of Artificial Sequence: Synthetic primer
cacagccctccattacagc

SEQ ID NO: 1115 - DNA, 22 bp, Artificial Sequence
  Description of Artificial Sequence: Synthetic primer
gtatgtttgtgttccatttgca

SEQ ID NO: 1116 - DNA, 22 bp, Artificial Sequence
  Description of Artificial Sequence: Synthetic primer
gtatgtttgtgttccatttgca

SEQ ID NO: 1117 - DNA, 19 bp, Artificial Sequence
  Description of Artificial Sequence: Synthetic primer
gaagagaggggccttgagc

SEQ ID NO: 1118 - DNA, 19 bp, Artificial Sequence
  Description of Artificial Sequence: Synthetic primer
tcccctgcctctgtgatgg

SEQ ID NO: 1119 - DNA, 21 bp, Artificial Sequence
  Description of Artificial Sequence: Synthetic primer
ctgaagcctgctttctttcat

SEQ ID NO: 1120 - DNA, 20 bp, Artificial Sequence
  Description of Artificial Sequence: Synthetic primer
cttcactgctatcttcccct

SEQ ID NO: 1121 - DNA, 18 bp, Artificial Sequence
  Description of Artificial Sequence: Synthetic primer
tcttggagccctgtattc

SEQ ID NO: 1122 - DNA, 17 bp, Artificial Sequence
  Description of Artificial Sequence: Synthetic primer
gtggctcacgcctataa

SEQ ID NO: 1123 - DNA, 20 bp, Artificial Sequence
  Description of Artificial Sequence: Synthetic primer
gttctctctgaaacctgtta

SEQ ID NO: 1124 - DNA, 17 bp, Artificial Sequence
  Description of Artificial Sequence: Synthetic primer
catgcaccagctgtgtg

SEQ ID NO: 1125 - DNA, 17 bp, Artificial Sequence
  Description of Artificial Sequence: Synthetic primer
gaacattccaggcaaac

SEQ ID NO: 1126 - DNA, 22 bp, Artificial Sequence
  Description of Artificial Sequence: Synthetic primer
gttctggtaaaaaaaaagtttg

SEQ ID NO: 1127 - DNA, 20 bp, Artificial Sequence
  Description of Artificial Sequence: Synthetic primer
ctgttgaacccagaaatatc

SEQ ID NO: 1128 - DNA, 17 bp, Artificial Sequence
  Description of Artificial Sequence: Synthetic primer
cactagccaccacgccc

SEQ ID NO: 1129 - DNA, 20 bp, Artificial Sequence
  Description of Artificial Sequence: Synthetic primer
caatgttgactgcattgact

SEQ ID NO: 1130 - DNA, 17 bp, Artificial Sequence
  Description of Artificial Sequence: Synthetic primer
gttctgaggttaccaga

SEQ ID NO: 1131 - DNA, 18 bp, Artificial Sequence
  Description of Artificial Sequence: Synthetic primer
accatcctagctaacacg

SEQ ID NO: 1132 - DNA, 21 bp, Artificial Sequence
  Description of Artificial Sequence: Synthetic primer
aatcacaagtacctcgaatac

SEQ ID NO: 1133 - DNA, 17 bp, Artificial Sequence
  Description of Artificial Sequence: Synthetic primer
aggtaagtggcagaact

SEQ ID NO: 1134 - DNA, 20 bp, Artificial Sequence
  Description of Artificial Sequence: Synthetic primer
tcaggcaagcacagtacaaa

SEQ ID NO: 1135 - DNA, 17 bp, Artificial Sequence
  Description of Artificial Sequence: Synthetic primer
gcctcccaagtagctgg

SEQ ID NO: 1136 - DNA, 24 bp, Artificial Sequence
  Description of Artificial Sequence: Synthetic primer
ccctaatctgaaaatctgaaatct

SEQ ID NO: 1137 - DNA, 23 bp, Artificial Sequence
  Description of Artificial Sequence: Synthetic primer
aagaattttcttattcaactgtc

SEQ ID NO: 1138 - DNA, 23 bp, Artificial Sequence
  Description of Artificial Sequence: Synthetic primer
cttcactaaataaaaatgtgtcc

SEQ ID NO: 1139 - DNA, 19 bp, Artificial Sequence
  Description of Artificial Sequence: Synthetic primer
gtttggctcacggaattat

SEQ ID NO: 1140 - DNA, 22 bp, Artificial Sequence
  Description of Artificial Sequence: Synthetic primer
tttaactcctagcttttaaaga

SEQ ID NO: 1141 - DNA, 20 bp, Artificial Sequence
  Description of Artificial Sequence: Synthetic primer
aatgtggctggtccgatctg

SEQ ID NO: 1142 - DNA, 17 bp, Artificial Sequence
  Description of Artificial Sequence: Synthetic primer
attctcctggctccctg

SEQ ID NO: 1143 - DNA, 17 bp, Artificial Sequence
  Description of Artificial Sequence: Synthetic primer
ttatccaggcgtccagg

SEQ ID NO: 1144 - DNA, 17 bp, Artificial Sequence
  Description of Artificial Sequence: Synthetic primer
tgatgccactggtcagg

SEQ ID NO: 1145 - DNA, 19 bp, Artificial Sequence
  Description of Artificial Sequence: Synthetic primer
aattcccctttgcactcat

SEQ ID NO: 1146 - DNA, 20 bp, Artificial Sequence
  Description of Artificial Sequence: Synthetic primer
ttacaactgtaagccaccgc

SEQ ID NO: 1147 - DNA, 17 bp, Artificial Sequence
  Description of Artificial Sequence: Synthetic primer
cctgacctcgtgatctg

SEQ ID NO: 1148 - DNA, 24 bp, Artificial Sequence
  Description of Artificial Sequence: Synthetic primer
ctctaggctagtattaatttttgt

SEQ ID NO: 1149 - DNA, 17 bp, Artificial Sequence
  Description of Artificial Sequence: Synthetic primer
taacgcctgtaatccca

SEQ ID NO: 1150 - DNA, 24 bp, Artificial Sequence
  Description of Artificial Sequence: Synthetic primer
acttgcatgtgtatgtatatatct

SEQ ID NO: 1151 - DNA, 17 bp, Artificial Sequence
  Description of Artificial Sequence: Synthetic primer
atgtcttttccccctct

SEQ ID NO: 1152 - DNA, 20 bp, Artificial Sequence
  Description of Artificial Sequence: Synthetic primer
aagtgctgggattacagata

SEQ ID NO: 1153 - DNA, 17 bp, Artificial Sequence
  Description of Artificial Sequence: Synthetic primer
ttgctccctctcccctt

SEQ ID NO: 1154 - DNA, 19 bp, Artificial Sequence
  Description of Artificial Sequence: Synthetic primer
cactgcatcaagatgggcc

SEQ ID NO: 1155 - DNA, 22 bp, Artificial Sequence
  Description of Artificial Sequence: Synthetic primer
caggtttgactcaaaactttaa

SEQ ID NO: 1156 - DNA, 21 bp, Artificial Sequence
  Description of Artificial Sequence: Synthetic primer
atgtcttttctgtactggata

SEQ ID NO: 1157 - DNA, 17 bp, Artificial Sequence
  Description of Artificial Sequence: Synthetic primer
tactgaggaggctgagg

SEQ ID NO: 1158 - DNA, 21 bp, Artificial Sequence
  Description of Artificial Sequence: Synthetic primer
aactctgtctctgcaaaaaaa

SEQ ID NO: 1159 - DNA, 19 bp, Artificial Sequence
  Description of Artificial Sequence: Synthetic primer
cagaaaaactgcacaaaaa

SEQ ID NO: 1160 - DNA, 20 bp, Artificial Sequence
  Description of Artificial Sequence: Synthetic primer
ctgtgataggaaaaaaggaa

SEQ ID NO: 1161 - DNA, 21 bp, Artificial Sequence
  Description of Artificial Sequence: Synthetic primer
ccagcagaggcaaaaataaga

SEQ ID NO: 1162 - DNA, 19 bp, Artificial Sequence
  Description of Artificial Sequence: Synthetic primer
tgccactgcactccagcct

SEQ ID NO: 1163 - DNA, 18 bp, Artificial Sequence
  Description of Artificial Sequence: Synthetic primer
aggaaaagagaggcaaac

SEQ ID NO: 1164 - DNA, 19 bp, Artificial Sequence
  Description of Artificial Sequence: Synthetic primer
gctgtcttcattctcttgt

SEQ ID NO: 1165 - DNA, 18 bp, Artificial Sequence
  Description of Artificial Sequence: Synthetic primer
cctattttcaagtcaggt

SEQ ID NO: 1166 - DNA, 23 bp, Artificial Sequence
  Description of Artificial Sequence: Synthetic primer
cctaaacagcagttttagtacat

SEQ ID NO: 1167 - DNA, 17 bp, Artificial Sequence
  Description of Artificial Sequence: Synthetic primer
agagaggggccttgagc

SEQ ID NO: 1168 - DNA, 17 bp, Artificial Sequence
  Description of Artificial Sequence: Synthetic primer
tgagccgggaaagggac

SEQ ID NO: 1169 - DNA, 20 bp, Artificial Sequence
  Description of Artificial Sequence: Synthetic primer
tgaagcctgctttctttcat

SEQ ID NO: 1170 - DNA, 20 bp, Artificial Sequence
  Description of Artificial Sequence: Synthetic primer
cttcactgctatcttcccct

SEQ ID NO: 1171 - DNA, 21 bp, Artificial Sequence
  Description of Artificial Sequence: Synthetic primer
ggtagagaatgtaataacagt

SEQ ID NO: 1172 - DNA, 17 bp, Artificial Sequence
  Description of Artificial Sequence: Synthetic primer
acgagaggggcggggcg

SEQ ID NO: 1173 - DNA, 17 bp, Artificial Sequence
  Description of Artificial Sequence: Synthetic primer
ttagagcagggcagggg

SEQ ID NO: 1174 - DNA, 17 bp, Artificial Sequence
  Description of Artificial Sequence: Synthetic primer
cagaatgctgagatggc

SEQ ID NO: 1175 - DNA, 17 bp, Artificial Sequence
  Description of Artificial Sequence: Synthetic primer
cacccggccgggaaaat

SEQ ID NO: 1176 - DNA, 19 bp, Artificial Sequence
  Description of Artificial Sequence: Synthetic primer
tggaatttgagaaggcctg

SEQ ID NO: 1177 - DNA, 20 bp, Artificial Sequence
  Description of Artificial Sequence: Synthetic primer
gccttacgagaatgttattt

SEQ ID NO: 1178 - DNA, 17 bp, Artificial Sequence
  Description of Artificial Sequence: Synthetic primer
agagtctgtagtcccaa

SEQ ID NO: 1179 - DNA, 24 bp, Artificial Sequence
  Description of Artificial Sequence: Synthetic primer
tgtattttccatagtaatttgctc

1. A method for identifying a subject at risk of breast cancer, which comprises detecting the presence or absence of one or more polymorphic variations associated with breast cancer in a nucleic acid sample from a subject, wherein the one or more polymorphic variations are detected in a nucleotide sequence selected from the group consisting of:
(a) a nucleotide sequence in SEQ ID NO: 2;
(b) a nucleotide sequence which encodes a polypeptide encoded by a nucleotide sequence in SEQ ID NO: 2;
(c) a nucleotide sequence which encodes a polypeptide that is 90% or more identical to the amino acid sequence encoded by a nucleotide sequence in SEQ ID NO, 2;
(d) a fragment of a nucleotide sequence of (a), (b), or (c);
whereby the presence of the polymorphic variation is indicative of the subject being at risk of breast cancer.

2. The method of claim 1, which further comprises obtaining the nucleic acid sample from the subject.

3-5. (canceled)

6. The method of claim 1, wherein the one or more polymorphic variations are detected at one or more positions in SEQ ID NO: 2 selected from the group consisting of 184, 506, 3981, 7815, 7875, 10775, 10786, 11013, 11020, 11101, 14171, 14278, 16512, 16706, 18442, 20286, 21591, 22275, 25318, 27997, 29840, 31088, 31258, 32367, 32427, 33671, 38796, 41530, 41874, 44161, 47502, 51089, 51205, 53645, 54280, 57610, 57740, 60812, 60837, 64448, 65249, 65482, 66535, 66789, 67214, 68347, 69060, 70100, 70215, 73687, 73732, 74183,74813, 78136, 79540, 79655, 79731, 82111, 82155, 83479, 84511, 85290, 90620, 91127, 92095, 92679, 94839 and 95220.

7. The method of claim 1, wherein the one or more polymorphic variations are detected at one or more positions in SEQ ID NO: 2 selected from the group consisting of 506, 3981, 7815, 7875, 11020, 11101, 18442, 47502, 53645, 65249, 73687, 73732, 74183, 79540, 82155, 85290, 90620, 91127, 92095, 92679, 94839 and 95220.

8. The method of claim 1, wherein the one or more polymorphic variations are detected at one or more positions in a region spanning positions 506-95220 in SEQ ID NO: 2.

9-17. (canceled)

18. The method of claim 1, wherein the one or more polymorphic variations are detected at one or more positions in linkage disequilibrium with one or more positions in claim 6.

19. The method of claim 1, wherein detecting the presence or absence of the one or more polymorphic variations comprises:
hybridizing an oligonucleotide to the nucleic acid sample, wherein the oligonucleotide is complementary to a nucleotide sequence in the nucleic acid and hybridizes to a region adjacent to the polymorphic variation;
extending the oligonucleotide in the presence of one or more nucleotides, yielding extension products; and
detecting the presence or absence of a polymorphic variation in the extension products.

20. The method of claim 1, wherein the subject is a human,

21-50. (canceled)

51. A method for detecting or preventing breast cancer in a subject, which comprises:
detecting the presence or absence of one or more polymorphic variations associated with breast cancer in a nucleic acid sample from a subject, wherein the polymorphic variation is detected in a nucleotide sequence selected from the group consisting of:
(a) a nucleotide sequence in SEQ ID NO: 2;
(b) a nucleotide sequence which encodes a polypeptide encoded by a nucleotide sequence in SEQ ID NO: 2;
(c) a nucleotide sequence which encodes a polypeptide that is 90% or more identical to the amino acid sequence encoded by a nucleotide sequence in SEQ ID NO: 2;
(d) a fragment of a nucleotide sequence of (a), (b), or (c) comprising the polymorphic variation; and
administering a breast cancer prevention procedure or detection procedure to a subject in need thereof based upon the presence or absence of the one or more polymorphic variations in the nucleic acid sample.

52. The method of claim 48, wherein the one or more polymorphic variations are detected at one or more positions in wherein the one or more polymorphic variations are detected at one or more positions in claim 6.

53. The method of claim 48, wherein the breast cancer detection procedure is selected from the group consisting of a mammography, an early mammography program, a frequent mammography program, a biopsy procedure, a breast biopsy and biopsy from another tissue, a breast ultrasound and optionally ultrasound analysis of another tissue, breast magnetic resonance imaging (MRI) and optionally MRI analysis of another tissue, electrical impedance (T-scan) analysis of breast and optionally of another tissue, ductal lavage, nuclear medicine analysis (e.g., scintimammography), BRCA1 and/or BRCA2 sequence analysis results, thermal imaging of the breast and optionally of another tissue, and a combination of the foregoing.

54. The method of claim 48, wherein the breast cancer prevention procedure is selected from the group consisting of one or more selective hormone receptor modulators, one or more compositions that prevent production of hormones, one or more hormonal treatments, one or more biologic response modifiers, surgery, and drugs that delay or halt metastasis.

55. The method of claim 51, wherein the selective hormone receptor modulator is selected from the group consisting of tamoxifen, reloxifene, and toremifene, the composition that prevents production of hormones is an aramotase inhibitor selected from the group consisting of exemestane, letrozole, anastrozol, groserelin, and megestrol; the hormonal treatment is selected from the group consisting of goserelin acetate and filvestrant; the biologic response modifier is an antibody that specifically binds herceptin/HER2; the surgery is selected from the group consisting of lumpectomy and mastectomy; and the drug that delays or halts metastasis is pamidronate disodium.

56-58. (canceled)

59. A method of selecting a subject that will respond to a treatment of breast cancer, which comprises:
detecting the presence or absence of one or more polymorphic variations associated with breast cancer in a nucleic acid sample from a subject, wherein the polymorphic variation is detected in a nucleotide sequence selected from the group consisting of:
(a) the nucleotide sequence of SEQ ID NO: 2;
(b) a nucleotide sequence which encodes a polypeptide consisting of an amino acid sequence encoded by a nucleotide sequence in SEQ ID NO: 2;
(c) a nucleotide sequence which encodes a polypeptide that is 90% or more identical to an amino acid sequence encoded by a nucleotide sequence in SEQ ID NO: 2; and
(d) a fragment of a nucleotide sequence of (a), (b), or (c) comprising the polymorphic variation; and
selecting a subject that will respond to the breast cancer treatment based upon the presence or absence of the one or more polymorphic variations in the nucleic acid sample.

60. The method of claim 56, wherein the one or more polymorphic variations are at one or more positions in wherein the one or more polymorphic variations are detected at one or more positions in claim 6.

61-64. (canceled)
